(19) United States
(12) Patent Application Publication
(10) Pub. No.: US 2009/0191599 A1
(43) Pub. Date: Jul. 30, 2009

(54) ENGINEERED LIGHT-HARVESTING ORGANISMS

(75) Inventors: Eric James Devroe, Malden, MA (US); David Arthur Berry, Brookline, MA (US); Noubar Boghos Afeyan, Lexington, MA (US); Dan Eric Robertson, Belmont, MA (US); Frank Anthony Skraly, Watertown, MA (US); Christian Perry Ridley, Acton, MA (US)

Correspondence Address: FENWICK & WEST LLP, SILICON VALLEY CENTER, 801 CALIFORNIA STREET, MOUNTAIN VIEW, CA, 94041, US

(73) Assignee: Joule Biotechnologies, Inc., Cambridge, MA (US)

(21) Appl. No.: 12/208,300

(22) Filed: Sep. 10, 2008

Related U.S. Application Data
(60) Provisional application No. 60/971,224, filed on Sep. 10, 2007.
(60) Provisional application No. 61/076,083, filed on Jun. 26, 2008.
(60) Provisional application No. 61/076,096, filed on Jun. 26, 2008.
(60) Provisional application No. 61/079,679, filed on Jul. 10, 2008.
(60) Provisional application No. 61/079,683, filed on Jul. 10, 2008.

(51) Int. Cl. C12P 19/04; C12N 1/21; C12P 5/00

(52) U.S. Cl. 435/101; 435/252.33; 435/166

(57) ABSTRACT

The present disclosure identifies pathways and mechanisms to confer photoautotrophic properties to a heterotrophic organism. The resultant engineered cell or organism will uniquely enable efficient conversion of carbon dioxide and light into biomass and carbon-based products of interest.

### CROSS REFERENCE TO RELATED APPLICATIONS

[0001] This application claims priority from U.S. Provisional Applications 60/971,224, filed on Sep. 10, 2007; 61/076,083 filed on Jun. 26, 2008; 61/076,096, filed on Jun. 26, 2008; 61/079,679, filed Jul. 10, 2008; and 61/079,683 filed Jul. 10, 2008, the disclosure of each of which is incorporated by reference herein for all purposes.

### REFERENCE TO SEQUENCE LISTING

[0002] This application is filed with an electronically submitted Sequence Listing, herein incorporated by reference in its entirety.

### FIELD

[0003] The present disclosure relates to identification of pathways and mechanisms to confer photoautotrophic properties to a heterotrophic organism and in particular to engineering the resultant synthetophototrophic organism to uniquely enable efficient conversion of carbon dioxide and light into biomass and carbon-based products of interest.

### BACKGROUND

[0004] Photosynthesis is a process by which biological entities utilize sunlight and CO₂ to produce sugars for energy. Photosynthesis, as naturally evolved, is an extremely complex system with numerous and poorly understood feedback loops, control mechanisms, and process inefficiencies. This complicated system presents likely insurmountable obstacles to either one-factor-at-a-time or global optimization approaches [Nedbal L, Cerven Ã J, Rascher U, Schmidt H. E-photosynthesis: a comprehensive modeling approach to understand chlorophyll fluorescence transients and other complex dynamic features of photosynthesis in fluctuating light. Photosynth Res. 2007 July; 93(1-3):223-34; Salvucci M E, Crafts-Brandner S J. Inhibition of photosynthesis by heat stress: the activation state of Rubisco as a limiting factor in photosynthesis. Physiol Plant. 2004 February; 120(2):179-186; Greene D N, Whitney S M, Matsumura I. Artificially evolved Synechococcus PCC6301 Rubisco variants exhibit improvements in folding and catalytic efficiency. Biochem J. 2007 Jun. 15; 404(3):517-24].

[0005] Existing photoautotrophic organisms (i.e., plants, algae, and photosynthetic bacteria) are poorly suited for industrial bioprocessing. In particular, said organisms have a slow doubling time (3-72 hrs) compared to industrialized heterotrophic organisms such as Escherichia coli (20 minutes). In addition, techniques for genetic manipulation (knockout, over-expression of transgenes via integration or episomic plasmid propagation) are inefficient, time-consuming, laborious, or non-existent.

### SUMMARY

[0006] Given these shortcomings, the present disclosure identifies pathways and mechanisms to confer photoautotrophic properties to a heterotrophic organism. The resultant engineered synthetophototrophic cell or organism will uniquely enable efficient conversion of carbon dioxide and light into biomass and carbon-based products of interest. In certain aspects, the present invention provides an engineered cell comprising at least two engineered nucleic acids, wherein at least one engineered nucleic acid is selected from a group consisting of a light capture nucleic acid, a carbon dioxide fixation pathway nucleic acid, a NADH pathway nucleic acid, and a NADPH pathway nucleic acid; and wherein a second engineered nucleic acid is selected from a distinct member of said group (i.e., if a first nucleic acid is a light capture nucleic acid, then at least one other nucleic acid must be a carbon dioxide fixation pathway nucleic acid, a NADH pathway nucleic acid, or a NADPH pathway nucleic acid). In a related embodiment, the cell is light dependent or fixes carbon. In yet another related embodiment, the cell has engineered phototrophic activity. In still another related embodiment, said cell is synthetophototrophic or fixed carbon or both. In yet another related embodiment, the cell is photoautotrophic in the presence of light and heterotrophic in the absence of light. In certain related embodiments, at least one engineered nucleic acid in the cell encodes proteorhodopsin. The invention also provides, in related embodiments, an engineered cell where the cell is a microorganism selected from the group consisting of Acetobacter aceti, Bacillus subtilis, Clostridium ljungdahlii, Clostridium thermocellum, Escherichia coli, Penicillium chrysogenum, Pichia pastoris, Saccharomyces cerevisiae, Schizosaccharomyces pombe, Pseudomonas fluorescens and Zymomonas mobilis.

[0007] In related embodiment, at least one of the engineered nucleic acids in the engineered cell is an exogenous nucleic acid. In other embodiments, at least one of the engineered nucleic acids is a modified endogenous gene. In certain aspects, the present invention provides an engineered cell comprising at least three engineered nucleic acids, wherein at least one engineered nucleic acid is selected from a group consisting of a light capture nucleic acid, a carbon dioxide fixation pathway nucleic acid, a NADH pathway nucleic acid, and a NADPH pathway nucleic acid; and wherein a second engineered nucleic acid is selected from a distinct member of said group; and wherein a third engineered nucleic acid is an additional modified endogenous gene, e.g., a gene from one of the above-mentioned four groups. In a related embodiment, said engineered nucleic acids are selected from at least three members of the group consisting of a light capture nucleic acid, a carbon dioxide fixation pathway nucleic acid, a NADH pathway nucleic acid, and a NADPH pathway nucleic acid. In yet another related embodiment, the cell of the invention comprises at least one engineered light capture nucleic acid, at least one engineered carbon dioxide fixation pathway nucleic acid, at least one engineered NADH pathway nucleic acid, and at least one engineered NADPH pathway nucleic acid. In yet another embodiment, the engineered cell of the invention comprises at least one engineered light capture nucleic acid and at least one engineered carbon dioxide fixation pathway nucleic acid.

[0008] In related embodiments of the engineered cell of the invention, at least one engineered nucleic acid is a light capture nucleic acid selected from the group consisting of proteorhodopsin, bacteriorhodopsin, deltarhodopsin, xanthorhodopsin, Leptosphaeria maculans opsin, isopentenyl-diphosphate delta-isomerase, 15,15′-beta-carotene dioxygenase, lycopene cyclase, phytoene synthase, phytoene dehydrogenase, geranylgeranyl pyrophosphate synthetase, beta-carotene ketolase, photosystem P840 reaction center large subunit, pscA, photosystem P840 reaction center iron-sulfur protein, pscB, photosystem P840 reaction center cytochrome c-551, pscC, photosystem P840 reaction center protein, pscD, bacteriochlorophyl a binding protein, Fenna-Mathews-Olson protein, FMO, Photosystem I P700 chlorophyll A apoproptein A1, psaA, Photosystem I P700 chlorophyll A apoproptein A2, psaB, Photosystem I iron-sulfur center subunit VII, psaC, Photosystem I reaction center subunit II, psaD, Photosystem I reaction centre subunit IV PsaE, Photosystem I reaction centre subunit IX PsaJ, Photosystem I reaction centre subunit III precursor (PSI-F), Photosystem I reaction centre subunit XII PsaM, Photosystem I reaction center subunit PsaK, Photosystem I assembly protein, Photosystem I subunit VIII PsaI, Photosystem I reaction centre subunit XI PsaL, Photosystem II protein X PsbX, Photosystem II reaction center D1, Photosystem II manganese-stabilizing protein PsbO, Photosystem II 10 kDa phosphoprotein PsbH, Photosystem II reaction center N protein PsbN, Photosystem II protein PsbI, Photosystem II protein PsbK, Photosystem II stability/assembly factor, Cytochrome b559 alpha subunit PsbE, Cytochrome b559 beta chain PsbF, Photosystem II protein L PsbL, Photosystem II protein J PsbJ, PucC protein, Photosystem II reaction center T PsbT, Photosystem II chlorophyll a-binding protein CP47 homolog, Photosystem II protein M PsbM, Photosystem II protein Psb27, Photosystem II protein Y PsbY, Photosystem II reaction centre W protein, Photosystem II protein P PsbP, Flavodoxin, IsiB, Photosystem II reaction center D2, Photosystem II chlorophyll a-binding protein CP43 homolog, and a Homolog of PsbF protein. In a related embodiment, the cell generates proton motive force, wherein the proton motive force promotes the growth of said cell in a light-dependent manner. In related embodiments, the growth of the engineered cell is in the presence of salt. In certain embodiments, the proton motive force is generated by proteorhodopsin. In yet other related embodiments, the engineered cell further comprises engineered rbcL nucleic acid, engineered rbcS nucleic acid, and engineered phosphoribulokinase.

[0009] In certain embodiments of the engineered cell of the invention, the at least one engineered nucleic acid is a carbon dioxide fixation pathway nucleic acid selected from the group consisting of a functional hydroxyproprionate cycle nucleic acid, a reductive TCA cycle nucleic acid, a reductive acetyl coenzyme A pathway nucleic acid, a reductive pentose phosphate cycle nucleic acid, a glyoxylate shunt pathway nucleic acid, a Calvin cycle nucleic acid and a gluconeogenesis pathway nucleic acid. In related embodiments, the at least one engineered nucleic acid is a carbon dioxide fixation pathway nucleic acid selected from the group consisting of acetyl-CoA carboxylase (subunit alpha), acetyl-CoA carboxylase (subunit beta), biotin-carboxyl carrier protein (accB), biotin-carboxylase, malonyl-CoA reductase, 3-hydroxypropionyl-CoA synthase, propionyl-CoA carboxylase (subunit alpha), propionyl-CoA carboxylase (subunit beta), methylmalonyl-CoA epimerase, methylmalonyl-CoA mutase, succinyl-CoA:L-malate CoA transferase (subunit alpha), succinyl-CoA:L-malate CoA transferase (subunit beta), fumarate reductase—frdA—flavoprotein subunit, fumarate reductase iron-sulfur subunit-frdb, g15 subunit [fumarate reductase subunit c], g13 subunit [fumarate reductase subunit D], fumarate hydratase—class I aerobic (fumA), L-malyl-CoA lyase, ATP-citrate lyase, subunit 1, ATP-citrate lyase, subunit 2, citryl-CoA synthase (large subunit, citryl-CoA synthase (small subunit), citryl-CoA ligase, malate dehydrogenase, fumarase hydratase (aerobic isozyme, fumA), succinate dehydrogenase (flavoprotein subunit—SdhA), SdhB iron-sulfur subunit, SdhC membrane anchor subunit, SdhD membrane anchor subunit, succinyl-CoA synthetase subunit alpha (sucD), succinyl-CoA synthetase subunit beta (sucC), alpha-ketoglutarate subunit alpha-korA, alpha-ketoglutarate subunit beta-korB, isocitrate dehydrogenase—NADP dependent, isocitrate dehydrogenase—NAD dependent Subunit 1, isocitrate dehydrogenase—NAD depend. Subunit 2, aconitate hydratase 1 (acnA), aconitate hydratase 2 (acnB), pyruvate synthase, subunit A porA, pyruvate synthase, subunit B porB, pyruvate synthase, subunit C porC, pyruvate synthase, subunit D porD, phosphoenolpyruvate synthase—ppsA, PEP carboxylase, ppC, NADP-dependent formate dehydrogenase—subunit A Mt-fdhA, NADP-dependent formate dehydrogenase—subunit B Mt-fdhB, formate tetrahydrofolate ligase, methenyltetrahydrofolate cyclohydrolase, methylene tetrahydrofolate reductase, metF, 5-methyltetrahydrofolate corrinoid/iron sulfur protein methyltransferase, acsE, carbon monoxide dehydrogenase/acetyl-CoA synthase—subunit alpha, carbon monoxide dehydrogenase/acetyl-CoA synthase—subunit beta, malate synthase—aceB, isocitrate lyase—aceA, malate dehydrogenase, pyruvate carboxylase, phosphoenolpyruvate carboxykinase, fructose-1,6-bisphosphatase, glucose-6-phosphatase—dog1, pyruvate ferredoxin:oxidoreductase with pyruvate synthase activity, fructose-1,6-bisphosphatase (FBPase) and sedoheptulose-1,7-bisphosphatase (SBPase), bifunctional, cbbF, glyceraldehyde-3-phosphate dehydrogenase (GAPDH), cbbG, phosphoribulokinase (PRK), cbbP, CP12, transketolase, cbbT, fructose 1,6-bisphosphate aldolase, cbbA, pentose-5-phosphate-3-epimerase, cbbE, ribose 5-phosphate isomerase, phosphoglycerate kinase, triosephosphate isomerase, tpiA, Ribulose-1,5-bisphosphate carbyxlase/oxygenase (RubisCo)—small subunit—cbbS, Ribulose-1,5-bisphosphate carbyxlase/oxygenase (RubisCo)—large subunit cbbL, Rubisco activase, rbcL, rbcS, Salinibacter fructose-bisphosphate aldolase, Synechococcus sp. 7002 fructose-bisphosphate aldolase (class I), Synechococcus elongatus PCC 7942 sedoheptulose-1,7-bisphosphatase, and T. elongatus BP-1 sedoheptulose-1,7-bisphosphatase. In other related embodiments, the at least one engineered nucleic acid is a codon-optimized carbon dioxide fixation pathway nucleic acid selected from the group consisting of Salinibacter fructose-bisphosphate aldolase, Synechococcus sp. 7002 fructose-bisphosphate aldolase (class I), Synechococcus elongatus PCC 7942 sedoheptulose-1,7-bisphosphatase, and T. elongatus BP-1 sedoheptulose-1,7-bisphosphatase. In a related embodiment, the cell generates proton motive force, wherein the proton motive force promotes the growth of said cell in a light-dependent manner. In another related embodiment, the growth of the engineered cell is in the presence of salt. In certain embodiments, the proton motive force is generated by proteorhodopsin. In yet other related embodiments, the engineered cell further comprises engineered rbcL nucleic acid, engineered rbcS nucleic acid, and engineered phosphoribulokinase. In yet another related embodiment, the carbon dioxide fixation pathway nucleic acid comprised by the engineered cell is a Woods-Ljungdahl pathway nucleic acid. In still another related embodiment, the cell further comprises an engineered glyoxylate shunt pathway nucleic acid and an exogenous gluconeogenesis pathway nucleic acid.

[0010] In another embodiment of the engineered light-capturing cell of the invention, at one least one engineered nucleic acid is a NADH pathway nucleic acid selected from the group consisting of soluble pyridine nucleotide transhydrogenase—udhA, membrane-bound pyridine nucleotide transhydrogenase—pntAB, NAD+-dependent isocitrate dehydrogenase—idh, NAD+-dependent isocitrate dehydrogenase—idh2, malate dehydrogenase, and NADH:ubiquinone oxidoreductase—OPERON (a-n). In a related embodiment, the at least one engineered nucleic acid is an endogenous NADH pathway nucleic acid selected from the group consisting of a nuo gene, a ndh gene, cytochrome bo, and cytochrome bd. In yet another related embodiment, the endogenous NADH pathway nucleic acid comprises a deletion or modification that disrupts said pathway. In another embodiment, the engineered cell of the invention comprises at least two engineered NADH pathway nucleic acids, wherein said at least two engineered NADH pathway nucleic acids include a soluble pyridine nucleotide dehydrogenase and a NAD⁺-dependent isocitrate dehydrogenase.

[0011] In another embodiment of the light-capturing cell of the invention, at least one engineered nucleic acid is a NADPH pathway nucleic acid selected from the group consisting of glucose-6-phosphate dehydrogenase, zwf 6-phosphogluconolactonase -pgi, 6-phosphogluconate dehydrogenase, gnd, NADP-dependent isocitrate dehydrogenase, NADP-dependent malic enzyme, soluble pyridine nucleotide transhydrogenase—udhA, or membrane-bound pyridine nucleotide transhydrogenase, subunit alpha, pntA and subunit beta, pntB. In a related embodiment, the engineered cell comprises at least two engineered NADPH pathway nucleic acids, wherein said at least two NADPH pathway nucleic acids include a soluble nucleotide dehydrogenase and a glucose-6-phosphate dehydrogenase. In yet another embodiment, one or more acetyl-CoA flux nucleic acids in the engineered cell are expressed or inhibited.

[0012] In other aspects, the present invention provides a host cell, wherein said host cell is engineered to capture light and fix carbon dioxide. In preferred embodiments, the present invention provides a host cell generating proton motive force, wherein said proton motive force promotes light-dependent growth of said cell. In related embodiments, the light-dependent growth of cell is in the presence of salt. The salt concentration in some embodiments is about 0.3 M. In some embodiments, the salt concentration is at least 0.3 M, e.g., between 0.3 M and 0.5 M.

[0013] In further aspects, the present invention provides a method for producing biological sugars, hydrocarbon products, solid forms of carbon, fuels, biofuels or pharmaceutical agents comprising culturing an engineered cell in the presence of CO2 and light under conditions sufficient to produce the carbon products and collecting or separating the carbon.

### BRIEF DESCRIPTION OF THE FIGURES

[0014] FIG. 1 shows typical inputs and outputs corresponding to an oxygenic photosynthetic organism. The engineered light-harvesting organisms in the present invention utilize the same inputs and intermediates, though oxygen output formation is optional.

[0015] FIG. 2 depicts the capture of light via a light-driven proton pump, such as proteorhodopsin. After Walter J M, Greenfield D, Bustamante C, Liphardt J. “Light-powering Escherichia coli with proteorhodopsin.” PNAS (2007). 104(7):2408-2412.

[0016] FIG. 3 illustrates absorption spectra of two different proteorhodopsin pumps expressed in E. coli and the spectrum exhibited by human rhodopsins.

[0017] FIG. 4 depicts expression of proteorhodopsin in E. coli BL21 DE(3). (A) Duplicate cultures of JCC349 induced with 0.1 mM IPTG in the presence or absence of 20 μM trans-retinal (B) Visible scan of the JCC349 culture incubated with retinal using the retinal-minus strain as the blank.

[0018] FIG. 5 represents growth for JCC349 in 0.3 M sodium chloride under green light. (A) Green LED array and aquarium setup (B) Bubble tubes of duplicate culture of JCC349 incubated in M9 media or in M9 media supplemented with 0.3M sodium chloride either under illumination by the green LED array or in the dark (C) Bubble tubes of duplicate culture of JCC349 incubated in M9 media supplemented with 0.3M sodium chloride either under illumination by the green LED array or in the dark (D) Pellets from 5 mls of cultures after resuspension in 1 ml Milli-Q water (1,2=M9 media in light; 3,4=M9/0.3M NaCl in light; 5,6=M9 media in dark; 7,8=M9/0.3M NaCl in dark).

[0019] FIG. 6 shows a graphical representation of overnight growth of JCC308-309 and JCC311-312 in M9/0.2% L-arabinose. (A) Growth in culture tubes while induced with IPTG (B) Overnight growth of JCC308 and JCC311 in bubble tubes (bt) and culture tubes (ct) while induced with IPTG.

[0020] FIG. 7 shows the results of co-expression of proteorhodopsin with prkA and RUBISCO genes. (A) Duplicate culture of JCC351 induced with 0.1 mM IPTG in the presence or absence of 20 μM trans-retinal (B) Growth of JCC 349 and JCC351-352 in bubble tubes while induced with IPTG (C) Growth of JCC 349 and JCC351-352 in culture tubes with and without 20 μM trans-retinal (D) Growth of JCC351 and JCC352 in bubble tubes (bt) and culture tubes (ct).

[0021] FIG. 8 is a schematic representation of glycogen biosynthesis after ¹³C incorporation into 3-phosphoglycerate catalyzed by RUBSICO. “*” indicates ¹³C label. Unshaded arrow indicates non-biosynthetic acid glycogen hydrolysis product glucose. Biosynthetic scheme indicates product if both 3-phosphoglyceraldehyde and dihydroxyacetone-phosphate (DHAP) are labeled. Since both labeled and non-labeled 3-phosphoglyceraldehyde are biosynthesized, four populations of glucose are anticipated as product [C-3, C-4 labeled]: [C-3 labeled]: [C-4 labeled]: [neither labeled] in a 1:1:1:1 ratio.

[0022] FIG. 9 shows a pathway for CO₂ assimilation in Crenarchaeota via 3-hydroxypropionate (3-HPA) cycle. After Hallam S J, Mincer T J, Schleper C, Preston C M, Roberts K, Richardson P M, DeLong. Pathways of carbon assimilation and ammonia oxidation suggested by environmental genomic analyses of marine Crenarchaeota. PLoS Biol. 2006 April; 4(4):e95.

[0023] FIG. 10 depicts a pathway for CO₂ fixation by Chloroflexus aurantiacus via 3-hydroxypropionate (3-HPA) cycle. After Herter S, Farfsing J, Gad'On N, Rieder C, Eisenreich W, Bacher A, Fuchs G. Autotrophic CO(2) fixation by Chloroflexus aurantiacus: study of glyoxylate formation and assimilation via the 3-hydroxypropionate cycle. J. Bacteriol. 2001 July; 183(14):4305-16.

[0024] FIG. 11 depicts a pathway for CO₂ assimilation via reductive acetyl-CoA pathway (Woods-Ljungdahl Pathway).

[0025] FIG. 12 depicts a pathway for CO₂ assimilation via reductive tricarboxylic acid (rTCA) cycle.

[0026] FIG. 13 depicts a pathway for gluconeogenesis.

[0027] FIG. 14 depicts an altered pathway for gluconeogenesis employing pyruvate:ferredoxin oxidoreductase (PFOR) to obtain pyruvate.

[0028] FIG. 15 illustrates the generation of inputs for gluconeogenesis using the glyoxylate shunt.

[0029] FIG. 16 illustrates the production of NADPH via the pentose phosphate pathway.

[0030] FIG. 17 illustrates the production of NADH by Rhodobacter sphaeroides based on denitrification.

[0031] FIG. 18 illustrates the generation of ATP and NADPH by Rhodobacter.

[0032] FIG. 19 illustrates comparative electron flow in anoxygenic photosynthetic bacteria.

### ABBREVIATIONS AND TERMS

[0033] The following explanations of terms and methods are provided to better describe the present disclosure and to guide those of ordinary skill in the art in the practice of the present disclosure. As used herein, “comprising” means “including” and the singular forms “a” or “an” or “the” include plural references unless the context clearly dictates otherwise. For example, reference to “comprising a cell” includes one or a plurality of such cells, and reference to “comprising the thioesterase” includes reference to one or more thioesterase peptides and equivalents thereof known to those of ordinary skill in the art, and so forth. The term “or” refers to a single element of stated alternative elements or a combination of two or more elements, unless the context clearly indicates otherwise.

[0034] Unless explained otherwise, all technical and scientific terms used herein have the same meaning as commonly understood to one of ordinary skill in the art to which this disclosure belongs. Although methods and materials similar or equivalent to those described herein can be used in the practice or testing of the present disclosure, suitable methods and materials are described below. The materials, methods, and examples are illustrative only and not intended to be limiting. Other features of the disclosure are apparent from the following detailed description and the claims.

[0035] Accession Numbers The accession numbers throughout this description are derived from various public databases, including NCBI database (National Center for Biotechnology Information) maintained by the National Institute of Health, U.S.A; TIGR (The Institute for Genomic Research; http://www.tigr.org/db.shtml); the KEGG database (Kyoto Encyclopedia of Genes and Genomes; http://www.genome.ad.jp/kegg/); and, in the case of Prochlorococcus accession numbers, from CyanoBase (http://bacteria.kazusa.or.jp/cyanobase/). The accession numbers from NCBI are as provided in the database on Sep. 4, 2007.

[0036] Enzyme Classification Numbers (EC): The EC numbers provided throughout this description are derived from the KEGG Ligand database, maintained by the Kyoto Encyclopedia of Genes and Genomics, sponsored in part by the University of Tokyo. The EC numbers are as provided in the database on Sep. 4, 2007.

[0037] DNA: Deoxyribonucleic acid. DNA is a long chain polymer which includes the genetic material of most living organisms (some viruses have genes including ribonucleic acid, RNA). The repeating units in DNA polymers are four different nucleotides, each of which includes one of the four bases, adenine, guanine, cytosine and thymine bound to a deoxyribose sugar to which a phosphate group is attached.

[0038] Amino acid: An organic compound containing an amino group (NH2), a carboxylic acid group (COOH), and any of various side groups, especially any of the 20 compounds that have the basic formula NH2CHRCOOH, and that link together by peptide bonds to form proteins or that function as chemical messengers and as intermediates in metabolism. The arrangement of amino acids in a peptide is coded for by triplets of nucleotides or “codons” in DNA molecules. The term codon is also used for the corresponding (and complementary) sequences of three nucleotides in the mRNA into which the DNA sequence is transcribed.

[0039] Endogenous: As used herein with reference to a nucleic acid molecule and a particular cell or microorganism refers to a nucleic acid sequence or peptide that is in the cell and was not introduced into the cell using recombinant engineering techniques. For example, a gene that was present in the cell when the cell was originally isolated from nature. A gene is still considered endogenous if the control sequences (e.g., promoter or enhancer sequences that activate transcription or translation) have been altered through recombinant techniques.

[0040] Exogenous: As used herein with reference to a nucleic acid molecule and a particular cell or microorganism refers to a nucleic acid sequence or peptide that was not present in the cell when the cell was originally isolated from nature. For example, a nucleic acid that originated in a different microorganism and was engineered into an alternate cell using recombinant DNA techniques or other methods is an endogenous nucleic acid.

[0041] Expression: The process by which a gene's coded information is converted into the structures and functions of a cell, such as a protein, transfer RNA, or ribosomal RNA. Expressed genes include those that are transcribed into mRNA and then translated into protein and those that are transcribed into RNA but not translated into protein (for example, transfer and ribosomal RNAs).

[0042] Overexpression: When a gene is caused to be transcribed at an elevated rate compared to the endogenous transcription rate for that gene. In some examples, overexpression additionally includes an elevated rate of translation of the gene compared to the endogenous translation rate for that gene. Methods of testing for overexpression are well known in the art. For example, transcribed RNA levels can be assessed using reverse transcriptase polymerase chain reaction (RT-PCR) and protein levels can be assessed using sodium dodecyl sulfate polyacrylamide gel elecrophoresis (SDS-PAGE) analysis. Furthermore, a gene is considered to be overexpressed when it exhibits elevated activity compared to its endogenous activity, which may occur, for example, through reduction in concentration or activity of its inhibitor, or via expression of a mutant version with elevated activity. In preferred embodiments, when the host cell encodes an endogenous gene with a desired biochemical activity, it is useful to overexpress an exogenous gene, which allows for more explicit regulatory control in the fermentation and a means to potentially mitigate the effects of central metabolism regulation, which is focused around the native genes explicity.

[0043] Downregulation: When a gene is caused to be transcribed at a reduced rate compared to the endogenous gene transcription rate for that gene. In some examples, downregulation additionally includes a reduced level of translation of the gene compared to the endogenous translation rate for that gene. Methods of testing for downregulation are well known to those in the art, for example the transcribed RNA levels can be assessed using RT-PCR and proteins levels can be assessed using SDS-PAGE analysis.

[0044] Knock-out: A gene whose level of expression or activity has been reduced to zero. In some examples, a gene is knocked-out via deletion of some or all of its coding sequence. In other examples, a gene is knocked-out via introduction of one or more nucleotides into its open-reading frame, which results in translation of a non-sense or otherwise non-functional protein product.

[0045] Autotroph: Autotrophs (or autotrophic organisms) are organisms that produce complex organic compounds from simple inorganic molecules and an external source of energy, such as light (photoautotroph) or chemical reactions of inorganic compounds.

[0046] Heterotroph: Heterotrophs (or heterotrophic organisms) are organisms that, unlike autotrophs, cannot derive energy directly from light or from inorganic chemicals, and so must feed on organic carbon substrates. They obtain chemical energy by breaking down the organic molecules they consume. Heterotrophs include animals, fungi, and numerous types of bacteria.

[0047] Synthetophototroph: A natively heterotrophic organism that through recombinant DNA techniques has been engineered to express endogenous and exogenous biosynthetic pathways which allow it to grow in an autotrophic manner.

[0048] Hydrocarbon: generally refers to a chemical compound that consists of the elements carbon (C), optionally oxygen (O), and hydrogen (H).

[0049] Biosynthetic pathway: Also referred to as “metabolic pathway,” refers to a set of anabolic or catabolic biochemical reactions for converting (transmuting) one chemical species into another. For example, a hydrocarbon biosynthetic pathway refers to the set of biochemical reactions that convert inputs and/or metabolites to hydrocarbon product-like intermediates and then to hydrocarbons or hydrocarbon products. Anabolic pathways involve constructing a larger molecule from smaller molecules, a process requiring energy. Catabolic pathways involve the breaking down of larger molecules, often accompanied by the release of energy.

[0050] Cellulose: Cellulose [(C₆H₁₀O₅)ₙ] is a long-chain polysaccharide polymer of beta-glucose. It forms the primary structural component of plants and is not digestible by humans. Cellulose is a common material in plant cell walls and was first noted as such in 1838. It occurs naturally in almost pure form only in cotton fiber; in combination with lignin and any hemicellulose, it is found in all plant material.

[0051] Surfactants: Surfactants are substances capable of reducing the surface tension of a liquid in which they are dissolved. They are typically composed of a water-soluble head and a hydrocarbon chain or tail. The water soluble group is hydrophilic and can be either ionic or nonionic, and the hydrocarbon chain is hydrophobic.

[0052] Biofuel: A biofuel is any fuel that derives from a biological source.

[0053] Engineered nucleic acid: An “engineered nucleic acid” is a nucleic acid molecule that includes at least one difference from a naturally-occurring nucleic acid molecule. An engineered nucleic acid includes all exogenous modified and unmodified heterologous sequences (i.e., sequences derived from an organism or cell other than that harboring the engineered nucleic acid) as well as endogenous genes, operons, coding sequences, or non-coding sequences, that have been modified, mutated, or that include deletions or insertions as compared to a naturally-occurring sequence. Engineered nucleic acids also include all sequences, regardless of origin, that are linked to an inducible promoter or to another control sequence with which they are not naturally associated.

[0054] Light capture nucleic acid: A “light capture nucleic acid” refers to a nucleic acid that alone or in combination with another nucleic acid encodes one or more proteins that convert light energy (i.e. photons) into chemical energy such as a proton gradient, reducing power, or a molecule containing at least one high-energy phosphate bond such as ATP or GTP. Examples of a light capture nucleic acid include nucleic acids encoding light-activated proton pumps such as rhodopsin, xanthorhodopsin, proteorhodopsin and bacteriorhodopsin.

[0055] Carbon dioxide fixation pathway nucleic acid: A “carbon dioxide fixation pathway nucleic acid” refers to a nucleic acid that alone or in combination with another nucleic acid encodes a protein that enables autotrophic carbon fixation. Examples of a carbon dioxide fixation pathway nucleic acid includes nucleic acids encoding propionyl-CoA carboxylase, pyruvate synthase, and formate dehydrogenase.

[0056] NADH pathway nucleic acid: A “NADH pathway nucleic acid” refers to a nucleic acid that alone or in combination with another nucleic acid encodes a protein to maintain an appropriately balanced supply of reduced NAD for carrying out carbon fixation.

[0057] NADPH pathway nucleic acid: A “NADPH pathway nucleic acid” refers to a nucleic acid that alone or in combination with another nucleic acid encodes a protein to maintain an appropriately balanced supply of reduced NADPH for carrying out carbon fixation.

[0058] Acetyl-CoA flux nucleic acid: An “acetyl-CoA flux nucleic acid” refers to a nucleic acid that alone or in combination with another nucleic acid encodes a protein whose overexpression, downregulation, or inhibition results in an increase in acetyl-CoA produced over a unit of time. Example nucleic acids that may be overexpressed include pantothenate kinase and pyruvate dehydrogenase. Nucleic acids that may be downregulated, inhibited, or knocked-out include acyl coenzyme A dehydrogenase, biosynthetic glycerol 3-phosphate dehydrogenase, and lactate dehydrogenase.

### DETAILED DESCRIPTION OF THE INVENTION

[0059] E. coli Bacterial Strains and Propagation

[0060] The non-pathogenic lab adapted E. coli strains K-12 serves as the parental strain for subsequent genetic manipulation (available via The Coli Genetic Stock Center (CGSC) at Yale University). Alternately E. coli strains W or B can be used. Commercially-available derivatives, containing the T7 RNA polymerase gene under control of the lacUV5 promoter such as BL21(DE3) [F⁻ ompT hsdS (r_{B}⁻m_{B}⁻) gal dcm λDE3; Novagen, Madison Wis.] are useful for driving recombinant protein expression encoded on plasmids containing the T7 RNA polymerase promoter.

[0061] Light is delivered through a variety of mechanisms, including natural illumination (sunlight), standard incandescent, fluorescent, or halogen bulbs, or via propagation in specially-designed illuminated growth chambers (for example Model LI15 Illuminated Growth Chamber (Sheldon Manufacturing, Inc. Cornelius, Oreg.). For experiments requiring specific wavelengths and/or intensities, light is distributed via light emitting diodes (LEDs), in which wavelength spectra and intensity can be carefully controlled (Philips).

[0062] Carbon dioxide is supplied via inclusion of solid media supplements (i.e., sodium bicarbonate) or as a gas via its distribution into the growth incubator. Most experiments are performed using concentrated carbon dioxide gas, at concentrations between 10 and 30%, which is directly bubbled into the growth media at velocities sufficient to provide mixing for the organisms. When concentrated carbon dioxide gas is utilized, the gas originates in pure form from commercially-available cylinders, or preferentially from concentrated sources including offgas from coal plants, refineries, cement production facilities, natural gas facilities, breweries, and others.

### Plasmids

[0063] Plasmids relevant to genetic engineering typically include at least two functional elements 1) an origin of replication enabling propagation of the DNA sequence in the host organism, and 2) a selective marker (for example an antibiotic resistance marker conferring resistance to ampicillin, kanamycin, zeocin, chloramphenicol, tetracycline, spectinomycin, and the like). Plasmids are often referred to as “cloning vectors” when their primary purpose is to enable propagation of a desired heterologous DNA insert. Plasmids can also include cis-acting regulatory sequences to direct transcription and translation of heterologous DNA inserts (for example, promoters, transcription terminators, ribosome binding sites). Such plasmids are frequently referred to as “expression vectors.”

[0064] Table 1, below, lists preferred genes of interest to enable conversion of a heterotrophic organism into a photoautotroph.

TABLE 1
Overexpression genes of interest

| | | | Exemplary Gene | | Locus/ | |
|---|---|---|---|---|---|---|
| Module | Pathway/Module | EC (if relevant) | Name | Organism | Accession | Alternates |
| Light | Light PMF | | Proteorhodopsin | Uncultured | ABL60988 | Alternatives include |
| capture | | | | marine bacterium | | the HOT 0 ml gene |
| | | | | HF10_19P19 | | (AF349978), the |
| | | | | | | HOT 75m4 gene |
| | | | | | | (AF349981), the |
| | | | | | | palE6 gene |
| | | | | | | (AF350002), and |
| | | | | | | the SAR86 gene |
| | | | | | | from eBAC31A08 |
| | | | | | | (AAG10475). |
| Light | light PMF | | Bacteriorhodopsin | Halobacterium | NP_280292 | Alternatives include |
| capture | | | | species NRC-1 | | the Halobacterium |
| | | | | | | salinarum gene |
| | | | | | | (V00474) |
| Light | light PMF | | deltarhodopsin | Haloterrigena sp | AB009620 | Alternatives include |
| capture | | | | arg-4 | | the variant |
| | | | | | | described in Kamo N |
| | | | | | | et al, BBRC |
| | | | | | | 2006, from |
| | | | | | | Haloterrigena |
| | | | | | | turkmenica, which |
| | | | | | | differs only in 2 |
| | | | | | | positions compared |
| | | | | | | to AB009620 |
| Light | light PMF | | xanthorhodopsin | Salinibacter | ABC44767 | |
| capture | | | | ruber DSM | | |
| | | | | 13855 | | |
| Light | light PMF | | Opsin | Leptosphaeria | AAG01180 | |
| capture | | | | maculans | | |
| Light | Retinal biosynthesis | 5.3.3.2 | Isopentenyl- | Uncultured | ABL60982 | Alternatives include |
| capture | | | diphosphate delta- | marine bacterium | | E. coli (JW2857) |
| | | | isomerase | HF10_19P19 | | and Rhodococcus |
| | | | | | | capsulatus |
| | | | | | | (CAA77535.1) |
| Light | Retinal biosynthesis | 1.14.99.36 | 15,15′-beta- | Uncultured | ABL60983 | Homo sapiens |
| capture | | | carotene | marine bacterium | | (AAG15380) and |
| | | | dioxygenase | HF10_19P19 | | Mus musculus |
| | | | | | | (AJ278064) |
| Light | Retinal biosynthesis | | Lycopene cyclase | Uncultured | ABL60984 | cruA gene from |
| capture | | | | marine bacterium | | Synechococcus sp |
| | | | | HF10_19P19 | | PCC 7002 |
| | | | | | | (EF529626) and |
| | | | | | | cruP from same |
| | | | | | | species |
| | | | | | | (EF529627), and |
| | | | | | | crtY from |
| | | | | | | Streptomyces |
| | | | | | | coelicolor |
| | | | | | | (SCJ12.03, or |
| | | | | | | NC_003888.3) |
| Light | Retinal biosynthesis | 2.5.1.32 | Phytoene synthase | Uncultured | ABL60985 | Streptomyces |
| capture | | | | marine bacterium | | coelicolor A3(2) |
| | | | | HF10_19P19 | | [locus SCO0187] or |
| | | | | | | Prochlorococcus |
| | | | | | | marinus crtB |
| | | | | | | [Pro0166 or |
| | | | | | | NC_005042.1] |
| Light | Retinal biosynthesis | | Phytoene | Uncultured | ABL60986 | Prochlorococcus |
| capture | | | dehydrogenase | marine bacterium | | marinus [Pro0167] |
| | | | | HF10_19P19 | | or |
| | | | | | | Thermosynechococcus |
| | | | | | | elongatus BP-1 |
| | | | | | | [tll1561] |
| Light | Retinal biosynthesis | | Geranylgeranyl | Uncultured | ABL60987 | Rhodobacter |
| capture | | | pyrophosphate | marine bacterium | | sphaeroides 2.4.1 |
| | | | synthetase | HF10_19P19 | | crtE gene |
| | | | | | | [RSP_0265] and |
| | | | | | | Arabidopsis |
| | | | | | | thaliana GGPS3 |
| | | | | | | [AT3G14550] |
| Light | Salinixanthin | | beta-carotene | Salinibacter | SRU_1502 | Other crtO genes |
| capture | | | ketolase | ruber DSM | | include |
| | | | | 13855 | | Rhodococcus |
| | | | | | | erythropolis |
| | | | | | | (AY705709), |
| | | | | | | Deinococcus |
| | | | | | | radiodurans R1 |
| | | | | | | (NP_293819).), and |
| | | | | | | Gloeobacter |
| | | | | | | violaceus PCC 7421 |
| | | | | | | [gvip239]. |
| Light | Green-sulfur | | photosystem P840 | Chlorobium | CT2020 | |
| capture | photosystem I | | reaction center large | tepidum | | |
| | | | subunit, pscA | | | |
| Light | Green-sulfur | | photosystem P840 | Chlorobium | CT2019 | |
| capture | photosystem I | | reaction center iron- | tepidum | | |
| | | | sulfur protein, pscB | | | |
| Light | Green-sulfur | | photosystem P840 | Chlorobium | CT1639 | |
| capture | photosystem I | | reaction center | tepidum | | |
| | | | cytochrome c-551, | | | |
| | | | pscC | | | |
| Light | Green-sulfur | | photosystem P840 | Chlorobium | CT0641 | |
| capture | photosystem I | | reaction center | tepidum | | |
| | | | protein, pscD | | | |
| Light | Green-sulfur | | bacteriochlorophyl | Chlorobium | CT1499 | |
| capture | photosystem I | | a binding protein, | tepidum | | |
| | | | Fenna-Mathews- | | | |
| | | | Olson protein, FMO | | | |
| Light | Cyanobacteria | | Photosystem I P700 | Prochlorococcus | Pro1672 | |
| capture | photosystem I | | chlorophyll A | marinus | | |
| | | | apoproptein A1, | | | |
| | | | psaA | | | |
| Light | Cyanobacteria | | Photosystem I P700 | Prochlorococcus | Pro1673 | |
| capture | photosystem I | | chlorophyll A | marinus | | |
| | | | apoproptein A2, | | | |
| | | | psaB | | | |
| Light | Cyanobacteria | | Photosystem I iron- | Prochlorococcus | Pro1767 | |
| capture | photosystem I | | sulfur center | marinus | | |
| | | | subunity VII, psaC | | | |
| Light | Cyanobacteria | | Photosystem I | Prochlorococcus | Pro1733 | |
| capture | photosystem I | | reaction center | marinus | | |
| | | | subunit II, psaD | | | |
| Light | Cyanobacteria | | Photosystem I | Prochlorococcus | Pro0371 | |
| capture | photosystem I | | reaction centre | marinus | | |
| | | | subunit IV PsaE | | | |
| Light | Cyanobacteria | | Photosystem I | Prochlorococcus | Pro0466 | |
| capture | photosystem I | | reaction centre | marinus | | |
| | | | subunit IX PsaJ | | | |
| Light | Cyanobacteria | | Photosystem I | Prochlorococcus | Pro0467 | |
| capture | photosystem I | | reaction centre | marinus | | |
| | | | subunit III precursor | | | |
| | | | (PSI-F | | | |
| Light | Cyanobacteria | | Photosystem I | Prochlorococcus | Pro0541 | |
| capture | photosystem I | | reaction centre | marinus | | |
| | | | subunit XII PsaM | | | |
| Light | Cyanobacteria | | Photosystem I | Prochlorococcus | Pro0929 | |
| capture | photosystem I | | reaction center | marinus | | |
| | | | subunit PsaK | | | |
| Light | Cyanobacteria | | Photosystem I | Prochlorococcus | Pro1253 | |
| capture | photosystem I | | assembly protein | marinus | | |
| Light | Cyanobacteria | | Photosystem I | Prochlorococcus | Pro1678 | |
| capture | photosystem I | | subunit VIII PsaI | marinus | | |
| Light | Cyanobacteria | | Photosystem I | Prochlorococcus | Pro1679 | |
| capture | photosystem I | | reaction centre | marinus | | |
| | | | subunit XI PsaL | | | |
| Light | Cyanobacteria | | Photosystem II | Prochlorococcus | Pro0076 | |
| capture | photosystem II | | protein X PsbX | marinus | | |
| Light | Cyanobacteria | | Photosystem II | Prochlorococcus | Pro0252 | |
| capture | photosystem II | | reaction center D1 | marinus | | |
| Light | Cyanobacteria | | Photosystem II | Prochlorococcus | Pro0257 | |
| capture | photosystem II | | manganese- | marinus | | |
| | | | stabilizing protein | | | |
| | | | PsbO | | | |
| Light | Cyanobacteria | | Photosystem II 10 kDa | Prochlorococcus | Pro0283 | |
| capture | photosystem II | | phosphoprotein | marinus | | |
| | | | PsbH | | | |
| Light | Cyanobacteria | | Photosystem II | Prochlorococcus | Pro0284 | |
| capture | photosystem II | | reaction center N | marinus | | |
| | | | protein PsbN | | | |
| Light | Cyanobacteria | | Photosystem II | Prochlorococcus | Pro0285 | |
| capture | photosystem II | | protein PsbI | marinus | | |
| Light | Cyanobacteria | | Photosystem II | Prochlorococcus | Pro0304 | |
| capture | photosystem II | | protein PsbK | marinus | | |
| Light | Cyanobacteria | | Photosystem II | Prochlorococcus | Pro0327 | |
| capture | photosystem II | | stability/assembly | marinus | | |
| | | | factor | | | |
| Light | Cyanobacteria | | Cytochrome b559 | Prochlorococcus | Pro0328 | |
| capture | photosystem II | | alpha subunit PsbE | marinus | | |
| Light | Cyanobacteria | | Cytochrome b559 | Prochlorococcus | Pro0329 | |
| capture | photosystem II | | beta chain PsbF | marinus | | |
| Light | Cyanobacteria | | Photosystem II | Prochlorococcus | Pro0330 | |
| capture | photosystem II | | protein L PsbL | marinus | | |
| Light | Cyanobacteria | | Photosystem II | Prochlorococcus | Pro0331 | |
| capture | photosystem II | | protein J PsbJ | marinus | | |
| Light | Cyanobacteria | | Possible PucC | Prochlorococcus | Pro0346 | |
| capture | photosystem II | | protein | marinus | | |
| Light | Cyanobacteria | | Photosystem II | Prochlorococcus | Pro0353 | |
| capture | photosystem II | | reaction center T | marinus | | |
| | | | PsbT | | | |
| Light | Cyanobacteria | | Photosystem II | Prochlorococcus | Pro0354 | |
| capture | photosystem II | | chlorophyll | marinus | | |
| | | | a-binding protein | | | |
| | | | CP47 homolog | | | |
| Light | Cyanobacteria | | Photosystem II | Prochlorococcus | Pro0357 | |
| capture | photosystem II | | protein M PsbM | marinus | | |
| Light | Cyanobacteria | | Photosystem II | Prochlorococcus | Pro0507 | |
| capture | photosystem II | | protein Psb27 | marinus | | |
| Light | Cyanobacteria | | Photosystem II | Prochlorococcus | Pro0586 | |
| capture | photosystem II | | protein Y PsbY | marinus | | |
| Light | Cyanobacteria | | Photosystem II | Prochlorococcus | Pro0771 | |
| capture | photosystem II | | reaction centre W | marinus | | |
| | | | protein | | | |
| Light | Cyanobacteria | | Photosystem II | Prochlorococcus | Pro1097 | |
| capture | photosystem II | | protein P PsbP | marinus | | |
| Light | Cyanobacteria | | Flavodoxin, IsiB | Prochlorococcus | Pro1164 | |
| capture | photosystem II | | | marinus | | |
| Light | Cyanobacteria | | Photosystem II | Prochlorococcus | Pro1254 | |
| capture | photosystem II | | reaction center D2 | marinus | | |
| Light | Cyanobacteria | | Photosystem II | Prochlorococcus | Pro1255 | |
| capture | photosystem II | | chlorophyll a- | marinus | | |
| | | | binding protein | | | |
| | | | CP43 homolog | | | |
| Light | Cyanobacteria | | Homolog of PsbF | Prochlorococcus | Pro1494 | |
| capture | photosystem II | | protein | marinus | | |
| Carbon | 3-Hydroxypropionate | 6.4.1.2 | Acetyl-CoA | Escherichia coli | AAA70370 | Homo sapiens |
| Fixation | cycle | | carboxylase | | | [ACACA, |
| | | | (subunit alpha) | | | NC000017.9] |
| Carbon | 3-Hydroxypropionate | 6.4.1.2 | Acetyl-CoA | Escherichia coli | AAA23807 | Arabidopsis |
| Fixation | cycle | | carboxylase | | | thaliana |
| | | | (subunit beta) | | | [AtCg00500] |
| Carbon | 3-Hydroxypropionate | 6.4.1.2 | Biotin-carboxyl | Escherichia coli | JW3223 | Bacillus halodurans |
| Fixation | cycle | | carrier protein | | | [BH1132], Vibrio |
| | | | (accB) | | | cholerae |
| | | | | | | [EAZ76879.1 or |
| | | | | | | A5E_0311] |
| Carbon | 3-Hydroxypropionate | 6.4.1.2 | biotin-carboxylase | Escherichia coli | AAA23748 | Photobacterium |
| Fixation | cycle | | | | | profundum 3TCK |
| | | | | | | [EAS42088.1 or |
| | | | | | | 90325619] |
| Carbon | 3-Hydroxypropionate | 1.1.1.59 | malonyl-CoA | Chloroflexus | AY530019 | |
| Fixation | cycle | | reductase | aurantiacus | | |
| Carbon | 3-Hydroxypropionate | | 3- | Chloroflexus | AF445079 | AMP-dependent |
| Fixation | cycle | | hydroxypropionyl- | aurantiacus | | synthetase and |
| | | | CoA synthase | | | ligase |
| | | | | | | [ABQ91563.1] from |
| | | | | | | Roseiflexus sp RS- |
| | | | | | | 1. |
| Carbon | 3-Hydroxypropionate | 6.4.1.3 | propionyl-CoA | Roseobacter | RD1_2032 | Homo sapiens |
| Fixation | cycle | | carboxylase | denitrificans | | mitochondrial |
| | | | (subunit alpha) | | | PCCA gene |
| | | | | | | [X14608]. Mus |
| | | | | | | musculus PCCA |
| | | | | | | gene [AY046947] |
| Carbon | 3-Hydroxypropionate | 6.4.1.3 | propionyl-CoA | Roseobacter | RD1_2028 | Rhodococcus |
| Fixation | cycle | | carboxylase | denitrificans | | erythropolis |
| | | | (subunit beta) | | | [AAB80770.1], |
| | | | | | | Homo sapiens |
| | | | | | | mitochondrial |
| | | | | | | PCCB [X73424] |
| Carbon | 3-Hydroxypropionate | 5.1.99.1 | methylmalonyl- | Rhodobacter | CP000661 | Homo sapiens |
| Fixation | cycle | | CoA epimerase | sphaeroides | | MCEE [AF364547] |
| Carbon | 3-Hydroxypropionate | 5.1.99.2 | methylmalonyl- | Escherichia coli | NC000913.2 | Homo sapiens MUT |
| Fixation | cycle | | CoA mutase | | | [M65131] |
| Carbon | 3-Hydroxypropionate | | succinyl-CoA:L- | Chloroflexus | DQ472736.1 | L-carnitine |
| Fixation | cycle | | malate CoA | aurantiacus | | dehydratase/bile |
| | | | transferase (subunit | | | acid-inducible |
| | | | alpha) | | | protein F from |
| | | | | | | Chloroflexus |
| | | | | | | aggregans DSM |
| | | | | | | 0485 |
| | | | | | | [ZP_01516527.1 or |
| | | | | | | EAV09800.1] |
| Carbon | 3-Hydroxypropionate | | succinyl-CoA:L- | Chloroflexus | DQ472737.1 | L-carnitine |
| Fixation | cycle | | malate CoA | aurantiacus | | dehydratase/bile |
| | | | transferase (subunit | | | acid-inducible |
| | | | beta) | | | protein F from |
| | | | | | | Chloroflexus |
| | | | | | | aggregans DSM |
| | | | | | | 9485 |
| | | | | | | [ZP_01516526.1 or |
| | | | | | | EAV09799.1] |
| Carbon | 3-Hydroxypropionate | 1.3.1.6 | fumarate reductase - | Escherichia coli | AAA23437.1 | Salmonella enterica |
| Fixation | cycle | | frdA-flavoprotein | | | subsp. enterica |
| | | | subunit | | | serovar fumarate |
| | | | | | | reductase |
| | | | | | | NP_458782.1 or |
| | | | | | | Klebsiella |
| | | | | | | pneumoniae |
| | | | | | | ABR79907.1 |
| Carbon | 3-Hydroxypropionate | 1.3.1.6 | fumarate reductase | Escherichia coli | EAY46226.1 | Salmonella |
| Fixation | cycle | | iron-sulfur subunit- | | | typhimurium LT2 |
| | | | frdb | | | succinate |
| | | | | | | dehydrogenase |
| | | | | | | [NP_463206.1] |
| Carbon | 3-Hydroxypropionate | 1.3.1.6 | g15 subunit | Escherichia coli | NP_290787.1 | Shigella flexneri 2a |
| Fixation | cycle | | [fumarate reductase | | | str. 301 |
| | | | subunit c] | | | [NP_710021.1], |
| | | | | | | Klebsiella |
| | | | | | | pneumoniae |
| | | | | | | ABR79905.1] |
| Carbon | 3-Hydroxypropionate | 1.3.1.6 | g13 subunit | Escherichia coli | NP_757086.1 | Salmonella enterica |
| Fixation | cycle | | [fumarate reductase | | | [YP_153210.1], |
| | | | subunit D] | | | Photorhabdus |
| | | | | | | luminescens |
| | | | | | | [NP_931317.1 |
| Carbon | 3-Hydroxypropionate | 4.2.1.2 | fumarate hydratase - | Escherichia coli | CAA25204 | Alternates include |
| Fixation | cycle | | class I aerobic | | | E. coli class I |
| | | | (fumA) | | | anaerobic fumarate |
| | | | | | | hydratase (fumB) |
| | | | | | | AAA23827 or class |
| | | | | | | II (fumC) |
| | | | | | | CAA27698 |
| Carbon | 3-Hydroxypropionate | 4.1.3.24 | L-malyl-CoA lyase | Roseobacter | NC_008209.1 | Silicibacter |
| Fixation | cycle | | | denitrificans | | pomeroyi DSS-3 |
| | | | | | | citrate lyase |
| | | | | | | putative |
| | | | | | | [YP_166806.1] and |
| | | | | | | alpha |
| | | | | | | proteobacterium |
| | | | | | | HTCC2255 |
| | | | | | | [ZP_01447127.1] |
| Carbon | Reductive TCA | 2.3.3.8 | ATP-citrate lyase, | Chlorobium | CT1089 | Chlorobium |
| Fixation | | | subunit 1 | tepidum | | limicola |
| | | | | | | [BAB21375.1], |
| | | | | | | Chlorobium |
| | | | | | | ferrooxidans DSM |
| | | | | | | 13031 |
| | | | | | | [ZP_01385848.1] |
| Carbon | Reductive TCA | 2.3.3.8 | ATP-citrate lyase, | Chlorobium | CT1088 | Chlorobium |
| Fixation | | | subunit 2 | tepidum | | limicola |
| | | | | | | [BAB21376.1], |
| | | | | | | Chlorobium |
| | | | | | | phaeobacteroides |
| | | | | | | [YP_911761.1], |
| | | | | | | Chlorobium |
| | | | | | | ferrooxidans |
| | | | | | | [ZP_01385849.1]. |
| Carbon | Reductive TCA | | citryl-CoA synthase | Hydrogenobacter | BAD17844 | Aquifex aeolicus |
| Fixation | | | (large subunit) | thermophilus | | [O67330], |
| | | | | | | Leptospirillum sp. |
| | | | | | | Group II UBA |
| | | | | | | [A3ERU1] |
| Carbon | Reductive TCA | | citryl-CoA synthase | Hydrogenobacter | BAD17846 | Aquifex aeolicus |
| Fixation | | | (small subunit) | thermophilus | | [NP_214297.1], |
| | | | | | | Leptospirillum sp |
| | | | | | | Group II UBA |
| | | | | | | [EAY57418.1] |
| Carbon | Reductive TCA | | citryl-CoA ligase | Hydrogenobacter | BAD17841 | Aquifex aeolicus |
| Fixation | | | | thermophilus | | [NP_213101.], |
| | | | | | | Hydrogenobacter |
| | | | | | | hydrogenophilus |
| | | | | | | [ABI50086.1] |
| Carbon | Reductive TCA | 1.1.1.37 | malate | Chlorobium | CAA56810 | Prosthecochloris |
| Fixation | | | dehydrogenase | tepidum | | vibrioformis |
| | | | | | | [CAA56809.1], |
| | | | | | | Pelodictyon |
| | | | | | | luteolum DSM 273 |
| | | | | | | [YP_375410.1] |
| Carbon | Reductive TCA | 4.2.1.2 | fumarase hydratase | Escherichia coli | JW1604 | Alternatives include |
| Fixation | | | (aerobic isozyme, | | | E. coli class I |
| | | | fumA) | | | anaerobic isozyme |
| | | | | | | fumB (JW4083) and |
| | | | | | | class II fumC |
| | | | | | | (JW1603) |
| Carbon | Reductive TCA | 1.3.99.1 | succinate | Escherichia coli | NP_415251 | Enterobacter sp. |
| Fixation | | | dehydrogenase | | | 638 |
| | | | (flavoprotein | | | [YP_001175956.1], |
| | | | subunit - SdhA) | | | Serratia |
| | | | | | | proteamaculans |
| | | | | | | [ZP_01538596.1] |
| Carbon | Reductive TCA | 1.3.99.1 | SdhB iron-sulfur | Escherichia coli | NP_415252 | Salmonella enterica |
| Fixation | | | subunit | | | [YP_151223.1], |
| | | | | | | Yersinia |
| | | | | | | enterocolitica |
| | | | | | | [YP_001007133.1] |
| Carbon | Reductive TCA | 1.3.99.1 | SdhC membrane | Escherichia coli | NP_415249 | Enterobacter sp. |
| Fixation | | | anchor subunit | | | 638 [ABP59903.1], |
| | | | | | | Yersinia |
| | | | | | | frederiksenii |
| | | | | | | [ZP_00828037.1] |
| Carbon | Reductive TCA | 1.3.99.1 | SdhD membrane | Escherichia coli | NP_415250 | Enterobacter sp. |
| Fixation | | | anchor subunit | | | 638 |
| | | | | | | [YP_001175955.1], |
| | | | | | | Klebsiella |
| | | | | | | pneumoniae |
| | | | | | | [YP_001334402.1] |
| Carbon | Reductive TCA | 6.2.1.5 | succinyl-CoA | Escherichia coli | AAA23900 | |
| Fixation | | | synthetase subunit | | | |
| | | | alpha (sucD) | | | |
| Carbon | Reductive TCA | 6.2.1.5 | succinyl-CoA | Escherichia coli | AAA23899 | |
| Fixation | | | synthetase subunit | | | |
| | | | beta (sucC) | | | |
| Carbon | Reductive TCA | 1.2.7.3 | alpha-ketoglutarate | Hydrogenobacter | AB046568: | Alternative enzyme |
| Fixation | | | subunit alpha - korA | thermophilus | 46-1869 | from Chlorobium |
| | | | | | | limicola DSM 245. |
| | | | | | | 4 subunit enzyme |
| | | | | | | with accession |
| | | | | | | numbers |
| | | | | | | EAM42575, |
| | | | | | | EAM42574, |
| | | | | | | EAM42853, |
| | | | | | | EAM42852. |
| Carbon | Reductive TCA | 1.2.7.3 | alpha-ketoglutarate | Hydrogenobacter | AB046568: | There is another 5- |
| Fixation | | | subunit beta - korB | thermophilus | 1883-2770 | subunit OGOR |
| | | | | | | cluster in the same |
| | | | | | | bacteria. Yun NR et |
| | | | | | | al. BBRC (2002). |
| | | | | | | A novel five- |
| | | | | | | subunit-type 2- |
| | | | | | | oxoglutalate:ferredoxin |
| | | | | | | oxidoreductases |
| | | | | | | from |
| | | | | | | Hydrogenobacter |
| | | | | | | thermophilus TK-6. |
| | | | | | | 292(1): 280-6. |
| | | | | | | Genes are |
| | | | | | | forDABGE |
| Carbon | Reductive TCA | 1.1.1.42 | Isocitrate | Chlorobium | EAM42635 | Another exemplary |
| Fixation | | | dehydrogenase - | limicola | | enzyme is |
| | | | NADP dependent | | | Synechococcus sp |
| | | | | | | WH 8102, icd, |
| | | | | | | accession |
| | | | | | | CAE06681 |
| Carbon | Reductive TCA | 1.1.1.41 | isocitrate | Saccharomyces | YNL037C | |
| Fixation | | | dehydrogenase - | cerevisiae | | |
| | | | NAD depend. | | | |
| | | | Subunit 1 | | | |
| Carbon | Reductive TCA | 1.1.1.41 | isocitrate | Saccharomyces | YOR136W | |
| Fixation | | | dehydrogenase - | cerevisiae | | |
| | | | NAD depend. | | | |
| | | | Subunit 2 | | | |
| Carbon | Reductive TCA | 4.2.1.3 | aconitate hydratase | Escherichia coli | b1276 | |
| Fixation | | | 1 (acnA) | | | |
| Carbon | Reductive TCA | 4.2.1.3 | aconitate hydratase | Escherichia coli | b0118 | |
| Fixation | | | 2 (acnB) | | | |
| Carbon | Reductive TCA | 1.2.7.1 | Pyruvate synthase, | Clostridium | AA036986 | |
| Fixation | | | subunit A porA | tetani E88 | | |
| Carbon | Reductive TCA | 1.2.7.1 | Pyruvate synthase, | Clostridium | AA036985 | |
| Fixation | | | subunit B porB | tetani E88 | | |
| Carbon | Reductive TCA | 1.2.7.1 | Pyruvate synthase, | Clostridium | AA036988 | |
| Fixation | | | subunit C porC | tetani E88 | | |
| Carbon | Reductive TCA | 1.2.7.1 | Pyruvate synthase, | Clostridium | AA036987 | |
| Fixation | | | subunit D porD | tetani E88 | | |
| Carbon | Reductive TCA | 2.7.9.2 | Phosphoenolpyruvate | Escherichia coli | AAA2431 | Another exemplary |
| Fixation | | | synthase - ppsA | | | enzyme is Aquifex |
| | | | | | | aeolicus VF5 ppsA |
| | | | | | | (locus AAC07865). |
| Carbon | Reductive TCA | 4.1.1.31 | PEP carboxylase, | Escherichia coli | CAA29332 | |
| Fixation | | | ppC | | | |
| Carbon | Woods-Ljungdahl | 1.2.1.4.3 | NADP-dependent | Moorella | AAB18330 | |
| Fixation | | | formate | thermoacetica | | |
| | | | dehydrogenase - | | | |
| | | | subunit A Mt-fdhA | | | |
| Carbon | Woods-Ljungdahl | 1.2.1.4.3 | NADP-dependent | Moorella | AAB18329 | |
| Fixation | | | formate | thermoacetica | | |
| | | | dehydrogenase - | | | |
| | | | subunit B Mt-fdhB | | | |
| Carbon | Woods-Ljungdahl | 6.3.4.3 | formate | Clostridium | M21507 | Alternative sources |
| Fixation | | | tetrahydrofolate | acidi-urici | | include locus |
| | | | ligase | | | AAB49329 from |
| | | | | | | Streptococcus |
| | | | | | | mutans (Swiss-Prot |
| | | | | | | entry Q59925) or |
| | | | | | | the Q8XHL4 |
| | | | | | | protein from |
| | | | | | | Clostridium |
| | | | | | | perfingens (locus |
| | | | | | | BA000016) |
| Carbon | Woods-Ljungdahl | 3.5.4.9 and | Methenyltetrahydro | Escherichia coli | AAA23803 | Alternative sources |
| Fixation | | 1.5.1.5 | folate | | | include locus |
| | | | cyclohydrolase | | | ABC19825 (folD) |
| | | | | | | from Moorella |
| | | | | | | thermoacetica, |
| | | | | | | locus AAO36126 |
| | | | | | | from Clostridium |
| | | | | | | tetani, and locus |
| | | | | | | BAB81529 from |
| | | | | | | Clostridium |
| | | | | | | perfingens All are |
| | | | | | | bifunctional folD |
| | | | | | | enzymes. |
| Carbon | Woods-Ljungdahl | 1.5.1.20 | methylene | Escherichia coli | CAA24747 | Alternative sources |
| Fixation | | | tetrahydrofolate | | | include locus |
| | | | reductase, metF | | | AAC23094 from |
| | | | | | | Haemophilus |
| | | | | | | influenzae, or locus |
| | | | | | | CAA30531 from |
| | | | | | | Salmonella |
| | | | | | | typhimurium. |
| Carbon | Woods-Ljungdahl | | 5- | Moorella | AAA53548 | Another exemplary |
| Fixation | | | methyltetrahydrofolate | thermoacetica | | enzyme is acsE |
| | | | corrinoid/iron | | | from |
| | | | sulfur protein | | | Carboxydothermus |
| | | | methyltransferase, | | | hydrogenoformas |
| | | | acsE | | | locus CP000141 |
| Carbon | Woods-Ljungdahl | 1.2.7.4 and | Carbon monoxide | Moorella | AAA23229 | |
| Fixation | | 1.2.99.2 | dehydrogenase/acetyl- | thermoacetica | | |
| | | | CoA synthase - | | | |
| | | | subunit alpha | | | |
| Carbon | Woods-Ljungdahl | 1.2.7.4 and | Carbon monoxide | Moorella | AAA23228 | |
| Fixation | | 1.2.99.2 | dehydrogenase/acetyl- | thermoacetica | | |
| | | | CoA synthase - | | | |
| | | | subunit beta | | | |
| Carbon | Glyoxylate Shunt | 2.3.3.9 | malate synthase - | Escherichia coli | JW3974 | E. coli encodes an |
| Fixation | | | aceB | | | alternate malate |
| | | | | | | synthase enzyme, |
| | | | | | | the JW2943 locus |
| | | | | | | malate synthase G |
| | | | | | | (glcB) |
| Carbon | Glyoxylate Shunt | 4.1.3.1 | isocitrate lyase - | Escherichia coli | JW3975 | |
| Fixation | | | aceA | | | |
| Carbon | Glyoxylate Shunt | 1.1.1.37 | malate | Escherichia coli | JW3205 | |
| Fixation | | | dehydrogenase | | | |
| Carbon | Gluconeogenesis | 6.4.4.1 | pyruvate | Saccharomyces | YGL062W | |
| Fixation | | | carboxylase | cerevisiae | | |
| Carbon | Gluconeogenesis | 4.1.1.49 | phosphoenolpyruvate | Escherichia coli | JW3366 | |
| Fixation | | | carboxykinase | | | |
| Carbon | Gluconeogenesis | 3.1.3.11 | fructose-1,6- | Escherichia coli | JW4191 | |
| Fixation | | | bisphosphatase | | | |
| Carbon | Gluconeogenesis | 3.1.3.68 | glucose-6- | Saccharomyces | YHR044C | Saccharomyces |
| Fixation | | | phosphatase - dog1 | cerevisiae | | cerevisiae encodes a |
| | | | | | | second glucose-6- |
| | | | | | | phosphatase, |
| | | | | | | YHR043C locus, |
| | | | | | | dog2 |
| Carbon | pyruvate synthesis | 1.2.7.1 | pyruvate | Moorella | Moth_0064 | |
| Fixation | | | ferredoxin:oxidoreductase | thermoaceticum | | |
| | | | with | | | |
| | | | pyruvate synthase | | | |
| | | | activity | | | |
| Carbon | Reductive pentose | | fructose-1,6- | Synechococcus | ZP_01124026 | |
| Fixation | phosphate | | bisphosphatase | sp. WH 7805 | | |
| | | | (FBPase) and | | | |
| | | | sedoheptulose-1,7- | | | |
| | | | bisphosphatase | | | |
| | | | (SBPase), | | | |
| | | | bifunctional, cbbF | | | |
| Carbon | Reductive pentose | 1.2.1.13 | glyceraldehyde-3- | Prochlorococcus | NP_875968 | |
| Fixation | phosphate | | phosphate | marinus | | |
| | | | dehydrogenase | | | |
| | | | (GAPDH), cbbG | | | |
| Carbon | Reductive pentose | 2.7.1.19 | phosphoribulokinase | Prochlorococcus | NP_894365 | |
| Fixation | phosphate | | (PRK), cbbP | marinus | | |
| Carbon | Reductive pentose | | CP12 | Thermosynechococcus | BAC09372 | Chlamydomonas |
| Fixation | phosphate | | | elongatus | | reinhardtii locus |
| | | | | BP-1 | | CAO03469; |
| | | | | | | Synechococcus |
| | | | | | | elongatus PCC |
| | | | | | | 6301 locus |
| | | | | | | BAD79451 |
| Carbon | Reductive pentose | 2.2.1.1 | transketolase, cbbT | Synechocystis sp. | BAD79173.1 | |
| Fixation | phosphate | | | PCC 6301 | | |
| Carbon | Reductive pentose | 4.1.2.13 | fructose 1,6- | Synechocystis sp. | BAA10184 | |
| Fixation | phosphate | | bisphosphate | PCC 6803 | | |
| | | | aldolase, cbbA | | | |
| Carbon | Reductive pentose | 5.1.3.1 | pentose-5- | Synechocystis sp. | BAD79110 | |
| Fixation | phosphate | | phosphate-3- | PCC 6301 | | |
| | | | epimerase, cbbE | | | |
| Carbon | Reductive pentose | 5.3.1.6 | ribose 5-phosphate | Synechococcus | BAD79129 | |
| Fixation | phosphate | | isomerase | elongatus PCC | | |
| | | | | 6301 | | |
| Carbon | Reductive pentose | 2.7.2.3 | phosphoglycerate | Synechococcus | BAD78623 | |
| Fixation | phosphate | | kinase | elongatus PCC | | |
| | | | | 6301 | | |
| Carbon | Reductive pentose | 5.3.1.1 | triosephosphate | Synechocystis sp | Q59994 | |
| Fixation | phosphate | | isomerase, tpiA | PCC 6803 | | |
| Carbon | Reductive pentose | 4.1.1.39 | Ribulose-1,5- | Synechococcus | AAB48081.1 | |
| Fixation | phosphate | | bisphosphate | sp WH7803 | | |
| | | | carbyxlase/oxygenase | | | |
| | | | (RubisCo) - small | | | |
| | | | subunit - cbbS | | | |
| Carbon | Reductive pentose | 4.1.1.39 | Ribulose-1,5- | Synechococcus | AAB8080.1 | |
| Fixation | phosphate | | bisphosphate | sp WH7803 | | |
| | | | carbyxlase/oxygenase | | | |
| | | | (RubisCo) - large | | | |
| | | | subunit cbbL | | | |
| Carbon | Reductive pentose | | Rubisco activase | Synechococcus | ABC98646 | |
| Fixation | phosphate | | | sp. JA-3-3Ab | | |
| Reducing | NADH | 1.1.1.41 | NAD⁺-dependent | Saccharomyces | YNL037C | |
| power | | | isocitrate | cerevisiae | | |
| | | | dehydrogenase - | | | |
| | | | idh1 | | | |
| Reducing | NADH | 1.1.1.41 | NAD⁺-dependent | Saccharomyces | YOR136W | |
| power | | | isocitrate | cerevisiae | | |
| | | | dehydrogenase - | | | |
| | | | idh2 | | | |
| Reducing | NADH | 1.1.1.37 | malate | Escherichia coli | JW3205 | |
| power | | | dehydrogenase | | | |
| Reducing | NADPH | 1.6.1.1 | soluble pyridine | Escherichia coli | NP_418397.2 | Alternates include |
| power | | | nucleotide | | | Shigella flexneri |
| | | | transhydrogenase | | | locus Q83MI1 |
| Reducing | NADH | | NADH:ubiquinone | Rhodobacter | AF029365 | Consists of 14 nuo |
| power | | | oxidoreductase - | capsulatus | | genes A-N and 7 |
| | | | OPERON (a-n), | | | ORFs of unknown |
| | | | note not listing | | | function |
| | | | genes individually | | | |
| Reducing | NADPH | 1.1.1.49 | glucose-6- | Escherichia coli | JW1841 | |
| power | | | phosphate | | | |
| | | | dehydrogenase, zwf | | | |
| Reducing | NADPH | 3.1.1.31 | 6- | Escherichia coli | JW0750 | |
| power | | | phosphogluconolactonase - | | | |
| | | | pgi | | | |
| Reducing | NADPH | 1.1.1.44 | 6-phosphogluconate | Escherichia coli | JW2011 | |
| power | | | dehydrogenase, | | | |
| | | | gnd | | | |
| Reducing | NADPH | 1.1.1.42 | NADP-dependent | Escherichia coli | JW1122 | |
| power | | | isocitrate | | | |
| | | | dehydrogenase | | | |
| Reducing | NADPH | 1.1.1.40 | NADP-dependent | Escherichia coli | JW2447 | |
| power | | | malic enyme | | | |
| Reducing | NADPH | 1.6.1.1 | soluble pyridine | Escherichia coli | NP_418397.2 | Alternates include |
| power | | | nucleotide | | | Shigella flexneri |
| | | | transhydrogenase | | | locus Q83MI1 |
| Reducing | NADPH | | membrane-bound | Escherichia coli | JW1595 | |
| power | | | pyridine nucleotide | | | |
| | | | transhydrogenase, | | | |
| | | | subunit alpha, pntA | | | |
| Reducing | NADPH | | membrane-bound | Escherichia coli | JW1594 | |
| power | | | pyridine nucleotide | | | |
| | | | transhydrogenase, | | | |
| | | | subunit beta, pntB | | | |

[0065] The nucleotide sequences for the indicated genes are assembled by Codon Devices Inc (Cambridge, Mass.). Note that these nucleotide sequence also include DNA sequences that encode the identical or homologous polypeptides, but encompassing nucleotide substitutions to 1) alter expression levels based on E. coli codon usage tables, 2) add or remove secondary structure, 3) add or remove restriction endonuclease recognition sequences, and/or 4) facilitate gene synthesis and assembly. Alternate providers, e.g., DNA2.0 (Menlo Park, Calif.), Blue Heron Biotechnology (Bothell, Wash.), and Geneart (Regensburg, Germany), are used as noted. Sequences untenable by commercial sources may be prepared using polymerase chain reaction (PCR) from DNA or cDNA samples, or cDNA/BAC libraries. Inserts are initially propagated and sequenced in pUC19. Importantly, primary synthesis and sequence verification of each gene of interest in pUC19 provides flexibility to transfer each unit in various combinations to alternate destination vectors to drive transcription and translation of the desired enzymes. Specific and/or unique cloning sites are included at the 5′ and 3′ ends of the open reading frames (ORFs) to facilitate molecular transfers.

[0066] The required metabolic pathways are initially encoded in expression cassettes driven by constitutive promoters which are always “on.” Many such promoters are known, for example the spc ribosomal protein operon (P_{spc}) the beta-lactamase gene promoter of pBR322 (P_{bla}), the bacteriophage lambda P_{L} promoter, the replication control promoters of plasmid pBR322 (P_{RNAI} or P_{RNAII}), or the P1 or P2 promoters of the rrnB ribosomal RNA operon [Liang S T, Bipatnath M, Xu Y C, Chen S L, Dennis P, Ehrenber M, Bremer H. Activities of Constitutive Promoters in Escherichia coli. J. Mol. Biol (1999). Vol 292, Number 1, pgs 19-37]. As necessary, after designing and testing pathways, the strength of constitutive promoters are “tuned” to increase or decrease levels of transcription to optimize a network, for example, by modifying the conserved −35 and −10 elements or the spacing between these elements [Alper H, Fischer C, Nevoigt E, Stephanopoulus G. “Tuning genetic control through promoter engineering.” PNAS (2005). 102(36): 12678-12783; Jensen P R and Hammer K. “The sequence of spacers between the consensus sequences modulates the strength of prokaryotic promoters.” Appl Environ Microbiol (1998). 64(I):82-87; Mijakovic I, Petranovic D, Jensen P R. Tunable promoters in system biology. Curr Opin Biotechnol (2005). 16:329-335; De Mey M, Maertens J, Lequeux G J, Soetaert W K, Vandamme E J. “Construction and model-based analysis of a promoter library from E. coli: an indispensable tool for metabolic engineering.” BMC Biotechnology (2007) 7:34].

[0067] When constitutive expression proves non-optimal (i.e., has deleterious effects, is out of sync with the network, etc.) inducible promoters are used. Inducible promoters are “off” (not transcribed) prior to addition of an inducing agent, frequently a small molecule or metabolite. Examples of suitable inducible promoter systems include the arabinose inducible P_{bad} [Khlebnikov A, Datsenko K A, Skaug T, Wanner B L, Keasling J D. “Homogeneous expression of the P(BAD) promoter in Escherichia coli by constitutive expression of the low-affinity high-capacity AraE transporter.” Microbiology (2001). 147 (Pt 12): 3241-7], the rhamnose inducible rhaPBAD promoter [Haldimann A, Daniels L, Wanner B. J Bacteriol (1998). “Use of new methods for construction of tightly regulated arabinose and rhamnose promoter fusions in studies of the Escherichia coli phosphate regulon.” 180:1277-1286], the propionate inducible pPRO [Lee S K and Keasling J D. “A propionate-inducible expression system for enteric bacteria.” Appl Environ Microbiol (2005). 71(11):6856-62)], the IPTG-inducible lac promoter [Gronenbom. Mol Gen Genet (1976). “Overproduction of phage lambda repressor under control of the lac promoter of Escherichia coli.” 148:243-250], the synthetic tac promoter [De Boer H A, Comstock L J, Vasser M. “The tac promoter: a functional hybrid derived from the trp and lac promoters.” PNAS (1983). 80:21-25], the synthetic trc promoter [Brosius J, Erfle M, Storella J. “Spacing of the −10 and −35 regions in the tac promoter. Effect on its in vivo activity.” J Biol Chem (1985). 260:3539-3541], or the T7 RNA polymerase system [Studier F W and Moffatt B A. “Use of bacteriophage T7 RNA polymerase to direct selective high-level expression of cloned genes.” J Mol Biol (1986]. 189:113-130, the tetracycline or anhydrotetracycline-inducible tetA promoter/operator system [Skerra A. “Use of the tetracycline promoter for the tightly regulated production of a murine antibody fragment in Escherichia coli” Gene (1994). 151:131-135]. These and other naturally-occurring or synthetically-derived inducible promoters are employed (see, e.g., U.S. Pat. No. 7,235,385; Methods for enhancing expression of recombinant proteins).

[0068] Alternate origins of replication are selected to provide additional layers of expression control. The number of copies per cell contributes to the “gene dosage effect.” For example, the high copy pMB1 or colE1 origins are used to generate 300-1000 copies of each plasmid per cell, which contributes to a high level of gene expression. In contrast, plasmids encoding low copy origins, such as pSC101 or p15A, are leveraged to restrict copy number to about 1-20 copies per cell. Techniques and sequences to further modulate plasmid copy number are known (see, e.g., U.S. Pat. No. 5,565,333, Plasmid replication origin increasing the copy number of plasmid containing said origin; U.S. Pat. No. 6,806,066, Expression vectors with modified ColE1 origin of replication for control of plasmid copy number).

[0069] Expression levels are also optimized by modulation of translation efficiency. In E. coli, a Shine-Dalgarno (SD) sequence [Shine J and Dalgarno L. Nature (1975) “Determination of cistron specificity in bacterial ribosomes.” 254(5495):34-8] is a consensus sequence that directs the ribosome to the mRNA and facilitates translation initiation by aligning the ribosome with the start codon. Modulation of the SD sequence is used to increase or decrease translation efficiency as appropriate [de Boer H A, Comstock L J, Hui A, Wong E, Vasser M. Gene Amplif Anal (1983). “Portable Shine-Dalgarno regions; nucleotides between the Shine-Dalgarno sequence and the start codon effect the translation efficiency”. 3: 103-16; Mattanovich D, Weik R, Thim S, Kramer W, Bayer K, Katinger H. Ann NY Acad Sci (1996). “Optimization of recombinant gene expression in Escherichia coli.” 782:182-90.]. Of note, a high level of translation can be observed in certain contexts in the absence of an SD sequence [Xu J, Mironova R, Ivanov I G, Abouhaidar M G. J Basic Microbiol (1999). “A polylinker-derived sequence, PL, highly increased translation efficiency in Escherichia coli.” 39(1):51-60]. Secondary mRNA structure is engineered in or out of the genes of interest to modulate expression levels [Cebe R and Geiser M. Protein Expr Purif (2006). “Rapid and easy thermodynamic optimization of 5′-end of mRNA dramatically increases the level of wild type protein expression in Escherichia coli.” 45(2):374-80; Zhang W, Xiao W, Wei H, Zhang J, Tian Z. Biochem Biophys Res Commun (2006). “mRNA secondary structure at start AUG codon is a key limiting factor for human protein expression in Escherichia coli.” 349(1):69-78; Voges D, Watzele M, Nemetz C, Wizemann S, Buchberger B. Biochem Biophys Res Commun (2004). “Analyzing and enhancing mRNA translational efficiency in an Escherichia coli in vitro expression system.” 318(2):601-14]. Codon usage is also manipulated to increase or decrease levels of translation [Deng T. FEBS Lett (1997). “Bacterial expression and purification of biologically active mouse c-Fos proteins by selective codon optimization.” 409(2):269-72; Hale R S and Thompson G. Protein Expr Purif (1998). “Codon optimization of the gene encoding a domain from human type 1 neurofibromin protein results in a threefold improvement in expression level in Escherichia coli.” 12(2):185-8].

[0070] In some embodiments, each gene of interest is expressed on a unique plasmid. In preferred embodiments, the desired biosynthetic pathways are encoded on multi-cistronic plasmid vectors. A variety of commercially available plasmid systems are of use, for example pACYCDuet-1, pCDFDuet-1, pCOLADuet-1, pETDuet-1, pRSFDuet-1 from Novagen, though more useful expression vectors are designed internally and synthesized by external gene synthesis providers. When the required biosynthetic pathways necessitate DNA inserts in excess of 15 kb, cosmids, fosmids, or bacteria artificial chromosomes (BACs) are employed in lieu of plasmids.

### Genetic Manipulations

[0071] E. coli are transformed using standard techniques known to those skilled in the art, including heat shock of chemically competent cells and electroporation [Berger and Kimmel, Guide to Molecular Cloning Techniques, Methods in Enzymology volume 152 Academic Press, Inc., San Diego, Calif.; Sambrook et al. (1989) Molecular Cloning—A Laboratory Manual (2nd ed.) Vol. 1-3, Cold Spring Harbor Laboratory, Cold Spring Harbor Press, N.Y.; and Current Protocols in Molecular Biology, F. M. Ausubel et al., eds., Current Protocols, a joint venture between Greene Publishing Associates, Inc. and John Wiley & Sons, Inc., (through and including the 1997 Supplement)].

[0072] The biosynthetic pathways and modules described below are first tested and optimized using episomal plasmids described above. Non-limiting optimizations include promoter swapping and tuning, ribosome binding site manipulation, alteration of gene order (e.g., gene ABC versus BAC, CBA, CAB, BCA), co-expression of molecular chaperones, random or targeted mutagenesis of gene sequences to increase or decrease activity, folding, or allosteric regulation, expression of gene sequences from alternate species, codon manipulation, addition or removal of intracellular targeting sequences such as signal sequences, and the like.

[0073] Each gene or module is optimized individually, or alternately, in parallel. Functional promoter and gene sequences are subsequently integrated into the E. coli chromosome to enable stable propagation in the absence of selective pressure (i.e., inclusion of antibiotics) using standard techniques known to those skilled in the art.

### Disruption of Endogenous DNA Sequences

[0074] In certain instances, chromosomal DNA sequence native (i.e., “endogenous”) to the host organism are altered. Manipulations are made to non-coding regions, including promoters, ribosome binding sites, transcription terminators, and the like to increase or decrease expression of specific gene product(s). In alternate embodiments, the coding sequence of an endogenous gene is altered to affect stability, folding, activity, or localization of the intended protein. Alternately, specific genes can be entirely deleted or “knocked-out.” Techniques and methods for such manipulations are known to those skilled in the art [Datsenko K A, Wanner B L. PNAS (2000). “One-step inactivation of chromosomal genes in E. coli K-12 using PCR Products.” 97: 6640-6645; Link A J et al. J Bacteriol (1997). “Methods for generating precise deletions and insertions in the genome of wild-type Escherichia coli: Application to open reading frame characterization.” 179:6228-6237; Baba T et al. Mol Syst Biol (2006). Construction of Escherichia coli K-12 in-frame, single gene knockout mutants: the Keio collection.” 2:2006.0008; Tischer B K, von Einem J, Kaufer B, Osterrieder N. Biotechniques (2006). “Two-step red-mediated recombination for versatile high-efficiency markerless DNA manipulation in Escherichia coli.” 40(2):191-7.; McKenzie G J, Craig N L. BMC Microbiol (2006). Fast, easy and efficient: site-specific insertion of transgenes into enterobacterial chromosomes using Tn7 without need for selection of the insertion event.” 6:39].

### Selections and Assays

[0075] Selective pressure provides a valuable means for testing and optimizing the above synthetic pathways. The ability to survive in CO₂-containing minimal media under ever diminishing concentrations of exogenous organic carbon sources (i.e., glucose) provides evidence for successful implementation of a carbon fixation pathway. The ability to grow under light, but not dark, conditions confirms that modified E. coli have been rendered light-dependent. The ability to grow in the presence of CO₂, light, and minimal media confirms that the engineered organisms are photoautotrophic.

[0076] If desired, additional genetic variation can be introduced prior to selective pressure by treatment with mutagens, such as ultra-violet light, alkylators [e.g., ethyl methanesulfonate (EMS), methyl methane sulfonate (MMS), diethylsulfate (DES), and nitrosoguanidine (NTG, NG, MMG)], DNA intercalators (e.g., ethidium bromide), nitrous acid, base analogs, bromouracil, transposons, and the like.

[0077] Alternately or in addition to selective pressure, pathway activity can be monitored following growth under permissive (i.e., non-selective) conditions by measuring specific product output via various metabolic labeling studies (including radioactivity), biochemical analyses (Michaelis-Menten), gas chromatography-mass spectrometry (GC/MS), mass spectrometry, matrix assisted laser desorption ionization time-of-flight mass spectrometry (MALDI-TOF), capillary electrophoresis (CE), and high pressure liquid chromatography (HPLC).

### Other Organisms

[0078] Organisms belonging to any of the three categories of organisms listed below can be converted into a synthetophototroph and used for production of carbon-based products of interest. The first category includes preferred organisms such as Escherichia coli. The second category includes good alternative organisms such as Acetobacter aceti, Bacillus subtilis, Clostridium ljungdahlii, Clostridium thermocellum, Penicillium chrysogenum, Pichia pastoris, Saccharomyces cerevisiae, Schizosaccharomyces pombe, Pseudomonas fluorescens, and Zymomonas mobilis. The third category includes all potential heterotrophic organisms (also known as heterotrophs), typically single-celled microorganisms, but also includes cell suspensions or cultures derived from multicellular organisms.

[0079] Heterotrophic prokaryotic organisms are engineered from genera such as, but not limited to, Agrobacterium, Anaerobacter, Aquabacterium, Azorhizobium, Bacillus, Bradyrhizobium, Clostridium, Cryobacterium, Escherichia, Enterococcus, Heliobacterium, Klebsiella, Lactobacillus, Methanococcus, Methanothermobacter, Micrococcus, Mycobacterium, Oceanomonas, Pennicillium, Pseudomonas, Rhizobium, Schizochitrium, Staphylococcus, Streptococcus, Streptomyces, Thermusaquaticus, Thermaerobacter, Thermobacillus, or Zymomonas as well other bacteria noted in the “List of Prokaryotic names with Standing in Nomenclature” (LPSN) website.

[0080] A single-cell suspension culture system can be derived from multi-cellular organisms using techniques well known to those of ordinary skill in the art. Such systems and their use are included in the scope of the present invention. Exemplary multi-cellular organisms from which such single-cell suspension cultures can be derived include Spodoptera frugiperda “Sf9” cells, Drosophila melanogaster “S2” cells, and Homo sapiens Hela S3 cells.

### Fermentation Methods

[0081] The production and isolation of products from synthetophototrophic organisms can be enhanced by employing specific fermentation techniques. An essential element to maximizing production while reducing costs is increasing the percentage of the carbon source that is converted to such products. Carbon atoms, during normal cellular lifecycles, go to cellular functions including producing lipids, saccharides, proteins, and nucleic acids. Reducing the amount of carbon necessary for non-product related activities can increase the efficiency of output production. This is achieved by first growing microorganisms to a desired density. A preferred density would be that achieved at the peak of the log phase of growth. At such a point, replication checkpoint genes can be harnessed to stop the growth of cells. Specifically, quorum sensing mechanisms (reviewed in Camilli, A. and Bassler, B. L Science 311:1113; Venturi, V. FEMS Microbio Rev 30: 274; and Reading, N. C. and Sperandio, V. FEMS Microbiol Lett 254:1) can be used to activate genes such as p53, p21, or other checkpoint genes. Genes that can be activated to stop cell replication and growth in E. coli include umuDC genes, the overexpression of which stops the progression from exponential phase to stationary growth (Murli, S., Opperman, T., Smith, B. T., and Walker, G. C. 2000 Journal of Bacteriology 182: 1127.). UmuC is a DNA polymerase that can carry out translesion synthesis over non-coding lesions—the mechanistic basis of most UV and chemical mutagenesis. The umuDC gene products are required for the process of translesion synthesis and also serve as a DNA damage checkpoint. UmuDC gene products include UmuC, UmuD, umuD′, UmuD′₂C, UmuD′₂ and UmuD₂. Simultaneously, the product synthesis genes are activated, thus minimizing the need for critical replication and maintenance pathways to be used while the product is being made.

[0082] Alternatively, cell growth and product production can be achieved simultaneously. In this method, cells are grown in bioreactors with a continuous supply of inputs and continuous removal of product. Batch, fed-batch, and continuous fermentations are common and well known in the art and examples can be found in Thomas D. Brock in Biotechnology: A Textbook of Industrial Microbiology, Second Edition (1989) Sinauer Associates, Inc., Sunderland, Mass., or Deshpande, Mukund V., Appl. Biochem. Biotechnol (1992), 36:227.

[0083] In all production methods, inputs include carbon dioxide, water, and light. The carbon dioxide can be from the atmosphere or from concentrated sources including offgas from coal plants, refineries, cement production facilities, natural gas facilities, breweries, and others. Water can be no-salt, low-salt, marine, or high salt. Light can be solar or from artificial sources including incandescent lights, LEDs, fiber optics, and fluorescent lights.

[0084] Light-harvesting organisms are limited in their productivity to times when the solar irradiance is sufficient to activate their photosystems. In a preferred light-harvesting organism bioprocess, cells are enabled to grow and produce product with light as the energetic driver. When there is a lack of sufficient light, cells can be induced to minimize their central metabolic rate. To this end, the inducible promoters specific to product production can be heavily stimulated to drive the cell to process its energetic stores in the product of choice. With sufficient induction force, the cell will minimize its growth efforts, and use its reserves from light harvest specifically for product production. Nonetheless, net productivity is expected to be minimal during periods when sufficient light is lacking as no to few photons are net captured.

[0085] In a preferred embodiment, the cell is engineered such that the final product is released from the cell. In embodiments where the final product is released from the cell, a continuous process can be employed. In this approach, a reactor with organisms producing desirable products can be assembled in multiple ways. In one embodiment, the reactor is operated in bulk continuously, with a portion of media removed and held in a less agitated environment such that an aqueous product will self-separate out with the product removed and the remainder returned to the fermentation chamber. In embodiments where the product does not separate into an aqueous phase, media is removed and appropriate separation techniques (e.g., chromatography, distillation, etc.) are employed.

[0086] In an alternate embodiment, the product is not secreted by the cells. In this embodiment, a batch-fed fermentation approach is employed. In such cases, cells are grown under continued exposure to inputs (light, water, and carbon dioxide) as specified above until the reaction chamber is saturated with cells and product. A significant portion to the entirety of the culture is removed, the cells are lysed, and the products are isolated by appropriate separation techniques (e.g., chromatography, distillation, filtration, centrifugation, etc.).

[0087] In a preferred embodiment, the fermentation chamber will enclose a fermentation that is undergoing a continuous reductive fermentation. In this instance, a stable reductive environment is created. The electron balance is maintained by the release of carbon dioxide (in gaseous form). Augmenting the NAD/H and NADP/H balance, as described above, also can be helpful for stabilizing the electron balance.

### Detection and Analysis of Gene and Cell Products

[0088] Any of the standard analytical methods, such as gas chromatography-mass spectrometry, and liquid chromatography-mass spectrometry, HPLC, capillary electrophoresis, Matrix-Assisted Laser Desorption Ionization time of flight-mass spectrometry, etc., can be used to analyze the levels and the identity of the product produced by the modified organisms of the present invention.

[0089] The ability to detect formation of a new, functional biochemical pathway in the synthetophototrophic cell is important to the practice of the subject methods. In general, the assays are carried out to detect heterologous biochemical transformation reactions of the host cell that produce, for example, small organic molecules and the like as part of a de novo synthesis pathway, or by chemical modification of molecules ectopically provided in the host cell's environment. The generation of such molecules by the host cell can be detected in “test extracts,” which can be conditioned media, cell lysates, cell membranes, or semi-purified or purified fractionation products thereof. The latter can be, as described above, prepared by classical fractionation/purification techniques, including phase separation, chromatographic separation, or solvent fractionation (e.g., methanol ethanol, acetone, ethyl acetate, tetrahydrofuran (THF), acetonitrile, benzene, ether, bicarbonate salts, dichloromethane, chloroform, petroleum ether, hexane, cyclohexane, diethyl ether and the like). Where the assay is set up with a responder cell to test the effect of an activity produced by the host cell on a whole cell rather than a cell fragment, the host cell and test cell can be co-cultured together (optionally separated by a culture insert, e.g. Collaborative Biomedical Products, Bedford, Mass., Catalog #40446).

[0090] In certain embodiments, the assay is set up to directly detect, by chemical or photometric techniques, a molecular species which is produced (or destroyed) by a biosynthetic pathway of the recombinant host cell. Such a molecular species' production or degradation must be dependent, at least in part, on expression of the heterologous genomic DNA. In other embodiments, the detection step of the subject method involves characterization of fractionated media/cell lysates (the test extract), or application of the test extract to a biochemical or biological detection system. In other embodiments, the assay indirectly detects the formation of products of a heterologous pathway by observing a phenotypic change in the host cell, e.g. in an autocrine fashion, which is dependent on the establishment of a heterologous biosynthetic pathway in the host cell.

[0091] In certain embodiments, analogs related to a known class of compounds are sought, as for example analogs of alkaloids, aminoglycosides, ansamacrolides, beta-lactams (including penicillins and cephalosporins), carbapenems, terpinoids, prostanoid hormones, sugars, fatty acids, lincosaminides, macrolides, nitrofurans, nucleosides, oligosaccharides, oxazolidinones, peptides and polypeptides, phenazines, polyenes, polyethers, quinolones, tetracyclines, streptogramins, sulfonamides, steroids, vitamins and xanthines. In such embodiments, if there is an available assay for directly identifying and/or isolating the natural product, and it is expected that the analogs would behave similarly under those conditions, the detection step of the subject method can be as straightforward as directly detecting analogs of interest in the cell culture media or preparation of the cell. For instance, chromatographic or other biochemical separation of a test extract may be carried out, and the presence or absence of an analog detected, e.g., spectrophotometrically, in the fraction in which the known compounds would occur under similar conditions. In certain embodiments, such compounds can have a characteristic fluorescence or phosphorescence which can be detected without any need to fractionate the media and/or recombinant cell.

[0092] In related embodiments, whole or fractionated culture media or lysate from a recombinant host cell can be assayed by contacting the test sample with a heterologous cell (“test cell”) or components thereof. For instance, a test cell, which can be prokaryotic or eukaryotic, is contacted with conditioned media (whole or fractionated) from a recombinant host cell, and the ability of the conditioned media to induce a biological or biochemical response from the test cell is assessed. For instance, the assay can detect a phenotypic change in the test cell, as for example a change in: the transcriptional or translational rate or splicing pattern of a gene; the stability of a protein; the phosphorylation, prenylation, methylation, glycosylation or other post translational modification of a protein, nucleic acid or lipid; the production of 2nd messengers, such as cAMP, inositol phosphates and the like. Such effects can be measured directly, e.g., by isolating and studying a particular component of the cell, or indirectly such as by reporter gene expression, detection of phenotypic markers, and cytotoxic or cytostatic activity on the test cell.

[0093] When screening for bioactivity of test compounds produced by the recombinant host cells, intracellular second messenger generation can be measured directly. A variety of intracellular effectors have been identified. For instance, for screens intended to isolate compounds, or the genes which encode the compounds, as being inhibitors or potentiators of receptor- or ion channel-regulated events, the level of second messenger production can be detected from downstream signaling proteins, such as adenylyl cyclase, phosphodiesterases, phosphoinositidases, phosphoinositol kinases, and phospholipases, as can the intracellular levels of a variety of ions.

[0094] In still other embodiments, the detectable signal can be produced by use of enzymes or chromogenic/fluorescent probes whose activities are dependent on the concentration of a second messenger, e.g., such as calcium, hydrolysis products of inositol phosphate, cAMP, etc.

[0095] Many reporter genes and transcriptional regulatory elements are known to those of skill in the art and others may be identified or synthesized by methods known to those of skill in the art. Examples of reporter genes include, but are not limited to CAT (chloramphenicol acetyl transferase) (Alton and Vapnek (1979), Nature 282: 864-869) luciferase, and other enzyme detection systems, such as beta-galactosidase; firefly luciferase (deWet et al. (1987), Mol. Cell. Biol. 7:725-737); bacterial luciferase (Engebrecht and Silverman (1984), PNAS 1: 4154-4158; Baldwin et al. (1984), Biochemistry 23: 3663-3667); alkaline phosphatase (Toh et al. (1989) Eur. J. Biochem. 182: 231-238, Hall et al. (1983) J. Mol. Appl. Gen. 2: 101), human placental secreted alkaline phosphatase (Cullen and Malim (1992) Methods in Enzymol. 216:362-368); β-lactamase or GST.

[0096] Transcriptional control elements for use in the reporter gene constructs, or for modifying the genomic locus of an indicator gene include, but are not limited to, promoters, enhancers, and repressor and activator binding sites. Suitable transcriptional regulatory elements may be derived from the transcriptional regulatory regions of genes whose expression is rapidly induced, generally within minutes, of contact between the cell surface protein and the effector protein that modulates the activity of the cell surface protein. Examples of such genes include, but are not limited to, the immediate early genes (see, Sheng et al. (1990) Neuron 4: 477-485), such as c-fos. Immediate early genes are genes that are rapidly induced upon binding of a ligand to a cell surface protein. The transcriptional control elements that are preferred for use in the gene constructs include transcriptional control elements from immediate early genes, elements derived from other genes that exhibit some or all of the characteristics of the immediate early genes, or synthetic elements that are constructed such that genes in operative linkage therewith exhibit such characteristics. The characteristics of preferred genes from which the transcriptional control elements are derived include, but are not limited to, low or undetectable expression in quiescent cells, rapid induction at the transcriptional level within minutes of extracellular simulation, induction that is transient and independent of new protein synthesis, subsequent shut-off of transcription requires new protein synthesis, and mRNAs transcribed from these genes have a short half-life. It is not necessary for all of these properties to be present.

[0097] In still other embodiments, the detection step is provided in the form of a cell-free system, e.g., a cell-lysate or purified or semi-purified protein or nucleic acid preparation. The samples obtained from the recombinant host cells can be tested for such activities as inhibiting or potentiating such pairwise complexes (the “target complex”) as involving protein-protein interactions, protein-nucleic acid interactions, protein-ligand interactions, nucleic acid-nucleic acid interactions, and the like. The assay can detect the gain or loss of the target complexes, e.g. by endogenous or heterologous activities associated with one or both molecules of the complex.

[0098] Assays that are performed in cell-free systems, such as may be derived with purified or semi-purified proteins, are often preferred as “primary” screens in that they can be generated to permit rapid development and relatively easy detection of an alteration in a molecular target when contacted with a test sample. Moreover, the effects of cellular toxicity and/or bioavailability of the test sample can be generally ignored in the in vitro system, the assay instead being focused primarily on the effect of the sample on the molecular target as may be manifest in an alteration of binding affinity with other molecules or changes in enzymatic properties (if applicable) of the molecular target. Detection and quantification of the pairwise complexes provides a means for determining the test samples efficacy at inhibiting (or potentiating) formation of complexes. The efficacy of the compound can be assessed by generating dose response curves from data obtained using various concentrations of the test sample. Moreover, a control assay can also be performed to provide a baseline for comparison. For instance, in the control assay conditioned media from untransformed host cells can be added.

[0099] The amount of target complex may be detected by a variety of techniques. For instance, modulation in the formation of complexes can be quantitated using, for example, detectably labeled proteins or the like (e.g., radiolabeled, fluorescently labeled, or enzymatically labeled), by immunoassay, or by chromatographic detection.

[0100] In still other embodiments, a purified or semi-purified enzyme can be used to assay the test samples. The ability of a test sample to inhibit or potentiate the activity of the enzyme can be conveniently detected by following the rate of conversion of a substrate for the enzyme.

[0101] In yet other embodiments, the detection step can be designed to detect a phenotypic change in the host cell which is induced by products of the expression of the heterologous genomic sequences. Many of the above-mentioned cell-based assay formats can also be used in the host cell, e.g., in an autocrine-like fashion.

[0102] In addition to providing a basis for isolating biologically-active molecules produced by the recombinant host cells, the detection step can also be used to identify genomic clones which include genes encoding biosynthetic pathways of interest. Moreover, by iterative and/or combinatorial sub-cloning methods relying on such detection steps, the individual genes which confer the detected pathway can be cloned from the larger genomic fragment.

[0103] The subject screening methods can be carried in a differential format, e.g. comparing the efficacy of a test sample in a detection assay derived with human components with those derived from, e.g., fungal or bacterial components. Thus, selectivity as a bacteriocide or fungicide can be a criterion in the selection protocol.

[0104] The host strain need not produce high levels of the novel compounds for the method to be successful. Expression of the genes may not be optimal, global regulatory factors may not be present, or metabolite pools may not support maximum production of the product. The ability to detect the metabolite will often not require maximal levels of production, particularly when the bioassay is sensitive to small amounts of natural products. Thus initial submaximal production of compounds need not be a limitation to the success of the subject method.

[0105] Finally, as indicated above, the test sample can be derived from, for example, conditioned media or cell lysates. With regard to the latter, it is anticipated that in certain instances there may be heterologously-expressed compounds that may not be properly exported from the host cell. There are a variety of techniques available in the art for lysing cells. A preferred approach is another aspect of the present invention, namely, the use of a host cell-specific lysis agent. For instance phage (e.g., P1, λ, φ80) can be used to selectively lyse E coli. Addition of such phage to grown cultures of E. coli host cells can maximize access to the heterologous products of new biosynthetic pathways in the cell. Moreover, such agents do not interfere with the growth of a tester organism, e.g., a human cell, that may be co-cultured with the host cell library.

### Metabolic Optimization

[0106] As part of the optimization process, the invention also provides steps to eliminate undesirable side reactions, if any, that may consume carbon and energy but do not produce useful products (such as hydrocarbons, wax esters, surfactants and other hydrocarbon products). These steps may be helpful in that they can help to improve yields of the desired products.

[0107] A combination of different approaches may be used. Such approaches include, for example, metabolomics (which may be used to identify undesirable products and metabolic intermediates that accumulate inside the cell), metabolic modeling and isotopic labeling (for determining the flux through metabolic reactions contributing to hydrocarbon production), and conventional genetic techniques (for eliminating or substantially disabling unwanted metabolic reactions). For example, metabolic modeling provides a means to quantify fluxes through the cell's metabolic pathways and determine the effect of elimination of key metabolic steps. In addition, metabolomics and metabolic modeling enable better understanding of the effect of eliminating key metabolic steps on production of desired products.

[0108] To predict how a particular manipulation of metabolism affects cellular metabolism and synthesis of the desired product, a theoretical framework was developed to describe the molar fluxes through all of the known metabolic pathways of the cell. Several important aspects of this theoretical framework include: (i) a relatively complete database of known pathways in Escherichia coli, (ii) incorporation of the growth-rate dependence of cell composition and energy requirements, (iii) experimental measurements of the amino acid composition of proteins and the fatty acid composition of membranes at different growth rates and dilution rates and (iv) experimental measurements of side reactions which are known to occur as a result of metabolism manipulation. These new developments allow significantly more accurate prediction of fluxes in key metabolic pathways and regulation of enzyme activity. (Keasling, J. D. et al., “New tools for metabolic engineering of Escherichia coli,” In Metabolic Engineering, Publisher Marcel Dekker, New York, Nym 1999; Keasling, J. D, “Gene-expression tools for the metabolic engineering of bacteria,” Trends in Biotechnology, 17, 452-460, 1999; Martin, V. J. J., et al., “Redesigning cells for production of complex organic molecules,” ASM News 68, 336-343 2002; Henry, C. S., et al., “Genome-Scale Thermodynamic Analysis of Escherichia coli Metabolism,” Biophys. J., 90, 1453-1461, 2006.)

[0109] Such types of models have been applied, for example, to analyze metabolic fluxes in organisms responsible for enhanced biological phosphorus removal in wastewater treatment reactors and in filamentous fungi producing polyketides. See, for example, Pramanik, et al., “A stoichiometric model of Escherichia coli metabolism: incorporation of growth-rate dependent biomass composition and mechanistic energy requirements.” Biotechnol. Bioeng. 56, 398-421, 1997; Pramanik, et al., “Effect of carbon source and growth rate on biomass composition and metabolic flux predictions of a stoichiometric model.” Biotechnol. Bioeng. 60, 230-238, 1998; Pramanik et al., “A flux-based stoichiometric model of enhanced biological phosphorus removal metabolism.” Wat. Sci. Tech. 37, 609-613, 1998; Pramanik et al., “Development and validation of a flux-based stoichiometric model for enhanced biological phosphorus removal metabolism.” Water Res. 33, 462-476, 1998.

### Products

[0110] The recombinant microorganisms of the present invention may be engineered to yield products categories, including but not limited to, biological sugars, hydrocarbon products, solid forms, and pharmaceuticals.

[0111] Biological sugars include but are not limited to glucose, starch, cellulose, hemicellulose, glycogen, xylose, dextrose, fructose, lactose, fructose, galactose, uronic acid, maltose, and polyketides. In preferred embodiments, the biological sugar may be glycogen, starch, or cellulose.

[0112] Cellulose is the most abundant form of living terrestrial biomass (Crawford, R. L. 1981. Lignin biodegradation and transformation, John Wiley and Sons, New York.). Cellulose, especially cotton linters, is used in the manufacture of nitrocellulose. Cellulose is also the major constituent of paper. Cellulose monomers (beta-glucose) are linked together through 1,4 glycosidic bonds. Cellulose is a straight chain (no coiling occurs). In microfibrils, the multiple hydroxide groups hydrogen-bond with each other, holding the chains firmly together and contributing to their high tensile strength. Given a cellulose material, the portion that does not dissolve in a 17.5% solution of sodium hydroxide at 20° C. is Alpha cellulose, which is true cellulose; the portion that dissolves and then precipitates upon acidification is Beta cellulose, and the proportion that dissolves but does not precipitate is Gamma cellulose. Hemicellulose is a class of plant cell-wall polysaccharide that can be any of several heteropolymers. These include xylane, xyloglucan, arabinoxylan, arabinogalactan, glucuronoxylan, glucomannan, and galactomannan. This class of polysaccharides is found in almost all cell walls along with cellulose. Hemicellulose is lower in weight than cellulose, and cannot be extracted by hot water or chelating agents, but can be extracted by aqueous alkali. Polymeric chains bind pectin and cellulose, forming a network of cross-linked fibers.

[0113] There are essentially three types of hydrocarbon products: (1) aromatic hydrocarbon products, which have at least one aromatic ring; (2) saturated hydrocarbon products, which lack double, triple or aromatic bonds; and (3) unsaturated hydrocarbon products, which have one or more double or triple bonds between carbon atoms. A “hydrocarbon product” may be further defined as a chemical compound that consists of C, H, and optionally O, with a carbon backbone and atoms of hydrogen and oxygen, attached to it. Oxygen may be singly or double bonded to the backbone and may be bound by hydrogen. In the case of ethers and esters, oxygen may be incorporated into the backbone, and linked by two single bonds, to carbon chains. A single carbon atom may be attached to one or more oxygen atoms. Hydrocarbon products may also include the above compounds attached to biological agents including proteins, coenzyme A and acetyl coenzyme A. Hydrocarbon products include, but are not limited to, hydrocarbons, alcohols, aldehydes, carboxylic acids, ethers, esters, carotenoids, and ketones.

[0114] Hydrocarbon products also include alkanes, alkenes, alkynes, dienes, isoprenes, alcohols, aldehydes, carboxylic acids, surfactants, wax esters, polymeric chemicals [polyphthalate carbonate (PPC), polyester carbonate (PEC), polyethylene, polypropylene, polystyrene, polyhydroxyalkanoates (PHAs), poly-beta-hydroxybutryate (PHB), polylactide (PLA), and polycaprolactone (PCL)], monomeric chemicals [propylene glycol, ethylene glycol, and 1,3-propanediol, ethylene, acetic acid, butyric acid, 3-hydroxypropanoic acid (3-HPA), acrylic acid, and malonic acid], and combinations thereof. In some preferred embodiments, the hydrocarbon products are alkanes, alcohols, surfactants, wax esters and combinations thereof. Other hydrocarbon products include fatty acids, acetyl-CoA bound hydrocarbons, acetyl-CoA bound carbohydrates, and polyketide intermediates.

[0115] Recombinant microorganisms can be engineered to produce hydrocarbon products and intermediates over a large range of sizes. Specific alkanes that can be produced include, for example, ethane, propane, butane, pentane, hexane, heptane, octane, nonane, decane, undecane, dodecane, tridecane, tetradecane, pentadecane, hexadecane, heptadecane, and octadecane. In preferred embodiments, the hydrocarbon products are octane, decane, dodecane, tetradecane, and hexadecane. Hydrocarbon precursors such as alcohols that can be produced include, for example, ethanol, propanol, butanol, pentanol, hexanol, heptanol, octanol, nonanol, decanol, undecanol, dodecanol, tridecanol, tetradecanol, pentadecanol, hexadecanol, heptadecanol, and octadecanol. In more preferred embodiments, the alcohol is selected from ethanol, propanol, butanol, pentanol, hexanol, heptanol, octanol, nonanol, and decanol.

[0116] Surfactants are used in a variety of products, including detergents and cleaners, and are also used as auxiliaries for textiles, leather and paper, in chemical processes, in cosmetics and pharmaceuticals, in the food industry and in agriculture. In addition, they may be used to aid in the extraction and isolation of crude oils which are found hard to access environments or as water emulsions. There are four types of surfactants characterized by varying uses. Anionic surfactants have detergent-like activity and are generally used for cleaning applications. Cationic surfactants contain long chain hydrocarbons and are often used to treat proteins and synthetic polymers or are components of fabric softeners and hair conditioners. Amphoteric surfactants also contain long chain hydrocarbons and are typically used in shampoos. Non-ionic surfactants are generally used in cleaning products.

[0117] Hydrocarbons can additionally be produced as biofuels. A biofuel is any fuel that derives from a biological source—recently living organisms or their metabolic byproducts, such as manure from cows. A biofuel may be further defined as a fuel derived from a metabolic product of a living organism. Preferred biofuels include, but are not limited to, biodiesel, biocrude, ethanol, “renewable petroleum,” butanol, and propane.

[0118] Solid forms of carbon including, for example, coal, graphite, graphene, cement, carbon nanotubes, carbon black, diamonds, and pearls. Pure carbon solids such as coal and diamond are the preferred solid forms.

[0119] Pharmaceuticals can be produced including, for example, isoprenoid-based taxol and artemisinin, or oseltamivir.

### Proteorhodopsin Photosystem

[0120] The genes of proteorhodopsin photosystems have been shown previously to be naturally linked genes from a wild type host. For example, a gene encoding proteorhodopsin and a set of genes for retinal biosynthesis have been identified from the uncultured marine bacterium HF10_{—}19p19 (accession number EF100190) SEQ ID NOS 162, 156, 151, 143, 136, 130 and 123; and HF10_{—}25f10 (accession number EF100190) SEQ ID NOS 163, 157, 152, 144, 137, 129 and 124 (Martinez, A., et al., PNAS USA, vol. 104:13 (2007) 5590-5595). Other uncultured marine bacteria having a linked set of genes for a proteorhodopsin photosystem include BAC17H8, SEQ ID NOS 165, 159, 154, 146, 139, 132 and 126 (accession number DQ068068; Futterer, O., et al., PNAS USA, vol. 101:24 (2004) 9091-9096); and BAC46A06 SEQ ID NOS 164, 158, 153, 145, 138, 131 and 125 (accession number DQ088847; Sabehi, G., et al., PLoS Biol vol 3:8 (2005) e273), also have been identified as hosts carrying a set of naturally linked genes for proteorhodopsin and retinal biosynthesis. Additionally, light capture via a light-driven proton pump, such as proteorhodopsin has been previously shown to generate a proton motive force that turns the flagellar motor in E. coli (FIG. 2).

[0121] Certain aspects of the invention include genes encoding the proteorhodopsin photosystem that have been codon and expression optimized as set forth in SEQ ID NOS 182, 194, 204, 220, 234, 246, 260; in SEQ ID NOS 180, 192, 202, 218, 232, 248, 258; in SEQ ID NOS 176, 188, 198, 214, 228, 242, 254; and SEQ ID NOS 178, 190, 200, 216, 230, 244 and 256, which can be introduced into a host cell as individual gene constructs or as a single synthetic operon. In one embodiment, the synthetic operon can be introduced into a heterologous bacterial host cell including, but not limited to, E. coli, as a functional, heterologous proteorhodopsin photosystem.

[0122] In certain embodiments a proteorhodopsin photosystem comprising a bacteriorhodopsin proton pump and retinal biosynthetic genes are selected from thermophilic hosts and combined into a single, synthetic operon or expressed as individual gene constructs. It will be understood that “proteorhodopsin” and “bacteriorhodopsin” are interchangeable with respect to functioning as a light-activated proton pump as used for the present invention.

[0123] A combination of proteorhodopsin photosystem genetic elements from host cells thriving in high temperature environments genetically engineered into heterologous host cells is advantageous for use in the elevated temperature environments such as bioreactors. For example, Picrophilis torridus (P. torridus; accession number NC_{—}005877) have the following genes representing an isopentenyl-diphosphate delta-isomerase SEQ ID NO:166, a carotene hydroxylase SEQ ID NO:160, a lycopene cyclase SEQ ID NO: 155, a phytoene dehydrogenase SEQ ID NO: 149, a phytoene synthase SEQ ID NO:141, and a geranylgeranyl pyrophosphate synthetase SEQ ID NO:135. In Thermosynechococcus elongotus BP-1 (T. elongotus; accession number NC_{—}004113) are genes representing a phytoene dehydrogenase SEQ ID NO: 148, a phytoene synthase SEQ ID NO:140, and a geranylgeranyl pyrophosphate synthetase SEQ ID NO:134. In Salinibacter ruber (S. ruber; accession number NC_{—}007677) are genes representing an isopentenyl-diphosphate delta-isomerase SEQ ID NO:168, a 15,15′-beta carotene dioxygenase SEQ ID NO:161, a phytoene dehydrogenase SEQ ID NO:150, a phytoene synthase SEQ ID NO: 142, and a bacteriorhodopsin SEQ ID NO: 128. In Pyrobaculum arsenaticum (P. arsenaticum; accession number NC_{—}009376) are genes representing a phytoene dehydrogenase SEQ ID NO: 147, isopentenyl-diphosphate delta-isomerase SEQ ID NO:167, and a geranylgeranyl pyrophosphate synthetase SEQ ID NO:133.

[0124] The above genes from P. torridus, T. elongotus, S. ruber and P. arsenaticum encoding photosystem genetic elements have been codon and expression optimized in the present invention SEQ ID NOS 174, 186, 196, 208, 224, 236; SEQ ID NOS 210, 226, 238; SEQ ID NOS 170, 184, 206, 222, 250; and SEQ ID NOS 172, 212 and 240, and can be expressed individually in a host cell or as a complete synthetic operon encoding a heterologous proteorhodopsin photosystem. In a preferred embodiment, the synthetic operon can be introduced into yeast host cells including Saccharomyces cerevisiae or Pichia pastoris, filamentous fungi host cells including Aspergillus, Trichoderma and Neurospora, mammalian host cells including murine and human, or insect host cells, and the like, as a heterologous, functional proteorhodopsin photosystem.

[0125] In certain aspects of the invention, expressing rational combinations of individual genetic elements found in a variety of cell types can result in a functional proteorhodopsin photosystem. For example, the genes for synthetic photoexpression operons can be a combination of genes from extremophile cells and/or non-extremophile cells. In one embodiment, an incomplete set of natural or codon and expression optimized genetic elements for a proteorhodopsin photosystem of P. torridus comprising an isopentenyl-diphosphate delta-isomerase, a carotene hydroxylase, a lycopene cyclase, a phytoene dehydrogenase, a phytoene synthase and a geranylgeranyl pyrophosphate synthetase may be genetically engineered into a host cell in combination with a proteorhodopsin natural or codon and expression optimized gene of the uncultured marine bacterium HF_{—}25F-10 or a bacteriodopsin gene of Candidatus pelagibacter ubique HTCC1062 (accession number NC_{—}007205; natural SEQ ID NO:127; optimized SEQ ID NO:252) to form a complete, functional proteorhodopsin photosystem. Alternatively, genetic elements for a complete photosystem from unrelated host cells may be combined to form a complete, functional proteorhodopsin photosystem for the specific host cell and specific environment such as a bioreactor operating at higher than ambient temperatures. In a preferred embodiment, genes represented by an isopentenyl-diphosphate delta-isomerase, a geranylgeranyl pyrophosphate synthetase and a lycopene cyclase gene from a P. torridus cell may be combined with a 15,15′-beta carotene dioxygenase, a phytoene dehydrogenase, a phytoene synthase, and a bacteriorhodopsin gene represented in a thermophilic S. ruber cell to form a fully functional proteorhodopsin photosystem for high temperature environments.

[0126] In yet another embodiment, a rational combination of genes from unrelated cells may be combined to form a functional proteorhodopsin photosystem wherein the production of ATP is in excess of the pool of ATP produced from a natural set of linked genes introduced into a heterologous host cell. Preferably, the rational combination of genes comprising a functional photosystem will be comprised of genes from thermophilic cells that result in higher ATP energy reserves than provided by a set of naturally linked, non-thermophilic cells when active in a high temperature bioreactor environment.

[0127] In another preferred embodiment, genes from unrelated heterologous cells combined to form a functional proteorhodopsin photosystem can produce pools of ATP in excess of endogenous host cell levels. Preferably, the rational combination of genes comprising a functional photosystem will be comprised of genes from thermophilic cells that result in higher ATP energy reserves than provided by alternative, endogenous biochemical pathways of a host cell.

[0128] In a more preferred embodiment, genes from unrelated heterologous cells combined to form a functional proteorhodopsin photosystem will produce pools of ATP to provide an additional or alternative ATP energy resource for the production of biofuels or other carbon based products of interest.

[0129] In an even more preferred embodiment, genes from unrelated heterologous cells combined to form a functional proteorhodopsin photosystem will produce pools of ATP in excess of endogenous host cell levels or in excess of a photosystem encoded by a set of linked genes to provide an additional or alternative ATP energy resource for the production of biofuels or other carbon based products of interest.

[0130] A preferred embodiment for the present invention is a method for genetically engineering into a host cell a photon activated proton pump comprising selecting from a first cell at least one nucleotide sequence from the group encoding polypeptides for proteorhodopsin, isopentenyl diphosphate δ-isomerase, geranylgeranyl pyrophosphate synthase, phytoene dehydrogenase, phytoene synthase, lycopene cyclase and carotene dehydrogenase; selecting from at least one second cell nucleotide sequences from the group encoding polypeptides for proteorhodopsin, isopentenyl diphosphate δ-isomerase, geranylgeranyl pyrophosphate synthase, phytoene dehydrogenase, phytoene synthase, lycopene cyclase and carotene dehydrogenase; combining said nucleotide sequences into a nucleic acid construct encoding a functional proteorhodopsin photosystem; and introducing into the host cell said nucleic acid construct.

[0131] Another preferred embodiment for the present invention is a method for genetically engineering into a host cell a photon activated proton pump wherein the nucleotide sequences of a nucleic acid construct encoding genes for the photon activated proton pump are modified for host specific codon usage and gene expression control.

[0132] Another preferred embodiment for the present invention is a method for genetically engineering into a host cell a photon activated proton pump wherein the nucleotide sequences of a nucleic acid construct encoding genes for the photon activated proton pump are modified for host specific codon usage and gene expression control and increase the synthesis of adenosine triphosphate in excess of endogenous adenosine triphosphate levels.

[0133] Another preferred embodiment for the present invention is a method for genetically engineering into a host cell a photon activated proton pump wherein the nucleotide sequences of a nucleic acid construct encoding genes for the photon activated proton pump are modified for host specific codon usage and gene expression control and increase the synthesis of adenosine triphosphate in excess of a proteorhodopsin photosystem introduced to the cell as a set of natural linked genes from a single cell.

[0134] In a more preferred embodiment, genes from unrelated heterologous cells combined to form a functional proteorhodopsin photosystem will produce pools of ATP to provide an additional or alternative ATP energy resource for the production of biofuels or other carbon based products of interest.

[0135] In an even more preferred embodiment, genes from unrelated heterologous cells combined to form a functional proteorhodopsin photosystem will produce pools of ATP in excess of endogenous host cell levels or in excess of a photosystem encoded by a set of linked genes to provide an additional or alternative ATP energy resource for the production of biofuels or other carbon based products of interest.

[0136] A preferred embodiment for the present invention is a method for genetically engineering into a host cell a photon activated proton pump comprising selecting from a first cell at least one nucleotide sequence from the group encoding polypeptides for proteorhodopsin, isopentenyl diphosphate δ-isomerase, geranylgeranyl pyrophosphate synthase, phytoene dehydrogenase, phytoene synthase, lycopene cyclase and carotene dehydrogenase; selecting from at least one second cell nucleotide sequences from the group encoding polypeptides for proteorhodopsin, isopentenyl diphosphate δ-isomerase, geranylgeranyl pyrophosphate synthase, phytoene dehydrogenase, phytoene synthase, lycopene cyclase and carotene dehydrogenase; combining said nucleotide sequences into a nucleic acid construct encoding a functional proteorhodopsin photosystem; and introducing into the host cell said nucleic acid construct.

[0137] Another preferred embodiment for the present invention is a method for genetically engineering into a host cell a photon activated proton pump wherein the nucleotide sequences of a nucleic acid construct encoding genes for the photon activated proton pump are modified for host specific codon usage and gene expression control.

[0138] Another preferred embodiment for the present invention is a method for genetically engineering into a host cell a photon activated proton pump wherein the nucleotide sequences of a nucleic acid construct encoding genes for the photon activated proton pump are modified for host specific codon usage and gene expression control and increase the synthesis of adenosine triphosphate in excess of endogenous adenosine triphosphate levels.

[0139] Another preferred embodiment for the present invention is a method for genetically engineering into a host cell a photon activated proton pump wherein the nucleotide sequences of a nucleic acid construct encoding genes for the photon activated proton pump are modified for host specific codon usage and gene expression control and increase the synthesis of adenosine triphosphate in excess of a proteorhodopsin photosystem introduced to the cell as a set of natural linked genes from a single cell.

[0140] Another preferred embodiment for the present invention is a method for genetically engineering into a host cell a photon activated proton pump wherein the nucleotide sequences of a nucleic acid construct encoding genes for the photon activated proton pump are modified for host-specific codon usage and gene expression control wherein the selected nucleotide sequences are from extremophile host cells including, but not limited to, Aquifex aeolicus, Bacillus halodurans, Bacillus stearothermophilus, Carboxydothermus hydrogenoformans Z-2901, Chloroflexus aurantiacus, Desulfotalea psychrophila LSv54, Deinococcus radiodurans, Salinibacter ruber DSM 13855, Thermoanaerobacter tengcongensis, Thermobifida fusca YX, Thermotoga maritime, Thermus thermophilus HB27, Thermus thermophilus HB8, Thermus aquaticus, Thermosynechococcus elongates, Thermococcus litoralis, Aeropyrum pernix, Geothermobacterium ferrireducens, Hyperthermus butylicus, Ignicoccus hospitalis, Staphylothermus marinus, Metallosphaera sedula, Sulfolobus acidocaldarius, Sulfolobus solfataricus, Sulfolobus tokodaii, Synechococcus lividis, Caldivirga maquilingensis, Pyrolobus fumarii, Pyrobaculum aerophilum, Pyrobaculum arsenaticum, Pyrobaculum calidifontis, Pyrobaculum islandicum, Thermofilum pendens, Thermoproteus neutrophilus, Pyrococcus abyssi, Pyrococcus furiosus, Pyrococcus horikoshii, Picrophilus torridus, Pyrodictium abyssi, Thermoplasma acidophilum, Thermoplasma volcanium, Methanobacterium thermoautotrophicum, Methanocaldococcus jannaschii, and Methanopyrus kandleri.

[0141] A more preferred embodiment for the present invention is a method for producing carbon based products of interest comprising selecting from a first cell at least one nucleotide sequence from the group encoding polypeptides for proteorhodopsin, isopentenyl diphosphate δ-isomerase, geranylgeranyl pyrophosphate synthase, phytoene dehydrogenase, phytoene synthase, lycopene cyclase and carotene dehydrogenase; selecting from at least one second cell nucleotide sequences from the group encoding polypeptides for proteorhodopsin, isopentenyl diphosphate δ-isomerase, geranylgeranyl pyrophosphate synthase, phytoene dehydrogenase, phytoene synthase, lycopene cyclase and carotene dehydrogenase; combining said nucleotide sequences into a nucleic acid construct encoding a functional proteorhodopsin photosystem; introducing into the host cell said nucleic acid construct; culturing the host cell to produce carbon based biofuels or products of interest. The carbon-based products of interest are removed from said host cell.

[0142] Another more preferred embodiment for the present invention is a method for producing carbon based products of interest genetically engineering into a host cell a photon activated proton pump wherein the nucleotide sequences of said nucleic acid construct are modified for host-specific codon usage and gene expression control.

[0143] Another more preferred embodiment for the present invention is a method for producing carbon based products of interest by genetically engineering into a host cell a photon activated proton pump wherein the nucleotide sequences of a nucleic acid construct encoding genes for the photon activated proton pump are modified for host specific codon usage and gene expression control and increase the synthesis of adenosine triphosphate in excess of endogenous adenosine triphosphate levels.

[0144] Another more preferred embodiment for the present invention is a method for producing carbon based products of interest by genetically engineering into a host cell a photon activated proton pump wherein the nucleotide sequences of a nucleic acid construct encoding genes for the photon activated proton pump are modified for host specific codon usage and gene expression control and increase the synthesis of adenosine triphosphate in excess of a proteorhodopsin photosystem introduced to the cell as a set of natural linked genes from a single cell.

[0145] In another aspect, the proteins of a heterologous proteorhodopsin photosystem described herein can be engineered to have peptide signal sequences localizing the expressed gene product to the host cell outer membrane. Signal peptides have been shown to be important for localization to cellular compartments such as a thylakoid lumen, the host cell outer membrane, plasma membrane or the periplasmic space (Rajalahti, T., et al., J. Proteome Res. Vol 6 (2007) 2420-2434). In a preferred embodiment, signal peptides specific for an outer membrane can be engineered into the nucleotide coding sequence to increase the efficacy of cellular localization of proteorhodopsin to a host cell outer membrane. For example, certain peptide signal sequences of Synechocystis sp PCC6803 are known to target the outer membrane (Rajalahti, T., et al.; included herein by reference in its entirety). In another example, retinal biosynthesis genes can be combined with nucleotide sequences for peptide signal sequences targeting the periplasmic space. Peptide signal sequences from Synechocystis sp PCC6803 are known to target the periplasmic space (Rajalahti, T., et al.; included herein by reference in its entirety).

[0146] In one embodiment, gene sequences for a functional photosystem can be designed to have heterologous sequences for signal peptides to target the expressed photosystem gene products to the appropriate region of the host cell. In a preferred embodiment, heterologous photosystem genes that are codon and expression optimized for an E. coli host cell will incorporate a codon and expression optimized signal sequence from a Synechocystis sp. PCC6803 cell to target the expressed gene product to the appropriate region of the host cell. In yet another embodiment, the synthetic operons of the invention described herein will incorporate a codon and expression optimized signal sequence from a Synechocystis sp. PCC6803 cell and be introduced into a yeast host cell including Saccharomyces cerevisiae or Pichia pastoris, filamentous fungi host cells including Aspergillus, Trichoderma and Neurospora, mammalian host cells including murine and human, or insect host cells, and the like, to target the expressed gene product to the appropriate region of the host cell. In yet another embodiment, the synthetic operons of the invention described herein will incorporate a codon and expression optimized signal sequence from a eukaryotic cell including but not limited to a yeast cell and be introduced into a second yeast host cell including Saccharomyces cerevisiae or Pichia pastoris, bacteria including, but not limited to, Synechococcus and E. coli, filamentous fungi host cells including Aspergillus, Trichoderma and Neurospora, mammalian host cells including murine and human, or insect host cells, and the like, to target the expressed gene product to the appropriate region of the host cell.

[0147] Although the invention has been described with reference to specific embodiments and aspects presented herein, it will be understood that variations and modifications of thermophilic genes engineered into a host cell for a functional proteorhodopsin photosystem are encompassed within the spirit and scope of the invention.

### Proteorhodopsin Selection

[0148] The protein pigments of the rhodopsin family appears to be spectrally tuned to different habitats-absorbing light at different wavelengths in accordance with light available in the environment (Beja et al., (2001) Nature 444:786-789) (FIG. 3). Under certain conditions proteorhodopsins may be adapted to different light intensities in their environment. A recent study suggests that proteorhodopsins were adapted to different light intensities in the marine environment via Darwinian evolution that involved substitutions of major effect and substitutions for fine-tuning of aborption maxima (Bielawski J. P., et al. (2004) Proc. Natl. Acad. Sci. USA 101: 14824-14829). It is contemplated, therefore, that the proteorhodopsins of the present invention can be selected, modified or engineered to absorb different wavelengths of light.

### Proteorhodopsin-Based Therapeutics

[0149] Photostimulation via introduction of naturally occurring light-sensitive channels and receptors, e.g., rhodopsin, has been demonstrated (Li X., (2005) Proc. Natl. Acad. Sci. USA 102:17816-17821). Accordingly, therapeutic applications based on light treatment using proteorhodopsins are also contemplated in this invention.

[0150] The examples provided herein illustrate the invention in more detail. These examples are provided to enable those skilled artisans to help understand and practice various aspects of the invention and therefore should not be construed as limiting. Various modifications and extensions of the invention in addition to those described herein will become apparent to those skilled artisans and therefore such modifications and extensions fall within the scope of invention.

### EXAMPLES

### Example 1

### E. coli Propagation

[0151] Wild-type bacteria are propagated in rich Luria-Bertani (LB) broth (10 g tryptone, 5 g yeast extract, 10 g NaCl per liter, pH 7.5-8.0) [Bertani G. J Bacteriol (1951). “Studies on lysogenesis. I. The mode of phage liberation by lysogenic Escherichia coli”. 62:293-300]. When functional CO₂-fixing pathways are engineered into E. coli, the requirements for rich media are eliminated. E. coli are propagated in minimal media, primarily minimal M9 broth (42 mM Na₂HPO₄, 24 mM KH₂PO₄, 9 mM NaCl, 19 mM NH₄Cl), 1 mM MgSO₄, 0.1 mM CaCl₂, 2.0% glucose, 0.5 μg/ml thiamine). With progressive engineering, propagation is performed with glucose levels significantly and progressively below 2% (for example, 0.1%, 0.01%, or most preferably 0% v/v). Bacteria are grown in liquid media using the above recipes, or on semi-solid plates containing agarose. Growth is analyzed quantitatively via measurement of optical density at various wavelengths. Optical density measured at a wavelength of 600 nm (OD₆₀₀) is used as a baseline measurement of growth, though additional wavelengths, including 360 nm, 420 nm, 540 nm, and 720 nm are used as corroborating values when chromophores are inserted and engineered.

[0152] E. coli is typically propagated at temperatures between 15-55° C., most typically 25-37° C. Samples of E. coli are archived indefinitely via inclusion of glycerol (typically 2-20% v/v) and stored at −80° C.

### Example 2

### Engineering Saccharomyces cerevisiae

[0153] In addition to the engineering of E. coli, the nonpathogenic and genetically tractable baker's yeast, Saccharomyces cerevisiae, is engineered. Methods for growth and manipulation are well known to those skilled in the art [J. R. Broach, E. W. Jones, and J. R. Pringle (eds.), “The Molecular and Cellular Biology of the Yeast Saccharomyces,” Vol. 1. Genome Dynamics, Protein Synthesis, and Energetics. Cold Spring Harbor Laboratory Press, Cold Spring Harbor, N.Y., 1991; E. W. Jones, J. R. Pringle, and J. R. Broach, (eds.), “The Molecular and Cellular Biology of the Yeast Saccharomyces,” Vol. 2. Gene Expression. Cold Spring Harbor Laboratory Press, Cold Spring Harbor, N.Y., 1992; J. R. Pringle, J. R. Broach, and E. W. Jones, (eds.), “The Molecular and Cellular Biology of the Yeast Saccharomyces,” Vol. 3. Cell cycle and Cell Biology. Cold Spring Harbor Laboratory Press, Cold Spring Harbor, N.Y., 1997].

[0154] S. cerevisiae is typically propagated at 20-30° C. on rich/complete media, such as YPD containing 1% Bacto-yeast extract, 2% Bacto-peptone, 2% Dextrose, 2% Bacto-agar. Alternately, defined media such as Synthetic Dextrose media (SD) comprising 20% Dextrose, 1.7% Difco Yeast nitrogenous base (lacking amino acids), 5% ammonium sulfate, plus specific essential amino acid and nutrient supplements [“drop in”] or Synthetic Complete (SC) media, containing all required amino acids or omitting one or more [“drop out” media], which proves useful during plasmid-based selections of auxotrophic mutants, can be used.

[0155] In certain instances, the same genetic sequence designed for heterologous expression in E. coli is utilized in yeast. In preferred embodiments, the DNA sequence is modified to preferred codon bias to match S. cerevisiae. Of course, irrespective of the codon bias of the open reading frames, specific non-coding elements are employed for successful propagation and expression in S. cerevisiae. Exemplary promoters include constitutive promoters GPD, KEX2, TEF1, and TDH, and inducible promoters GAL1 [Nacken V, Achstetter T, Degryse E. “Probing the limits of expression levels by varying promoter strength and plasmid copy number in Saccharomyces cerevisiae.” Gene (1996). 175(1-2):253-60]. Copy number can be modified via use of single-copy centromeric vectors or medium-to-high copy 2 micron vectors [Nacken V et al]. When biosynthetic modules are too large for propagation in plasmids, yeast artificial chromosomes (YACs) are employed. Alternately, portions of the biosynthetic pathway are serially integrated into the yeast chromosome.

[0156] Plasmids are transformed into S. cerevisiae via the lithium acetate method using the S.c. EasyComp transformation kit (Invitrogen, Carlsbad, Calif.). Alternately, S. cerevisiae are transformed via electroporation or spheroplasting, techniques known to those skilled in the art.

### Example 3

### Engineering Acetobacter

[0157] Acetobacter aceti, strain 10-8S2 from (Okumura H, Uozumi T, and Beppu T. “Construction of plasmid vector and genetic transformation system for Acetobacter aceti.” Agril. Biol. Chem. (1985). 49:1011-1017) is also engineered, using techniques known to those skilled in the art (Okumura H, Uozumi T, and Beppu T. “Construction of plasmid vector and genetic transformation system for Acetobacter aceti.” Agril. Biol. Chem. (1985). 49:1011-1017; Nakano, S, Fukaya, M, Horinouchi S. “Putative ABC Transporter Responsible for Acetic Acid Resistance in Acetobacter aceti.” Appl. And Environ. Microbiol (2006). 72(1):497-505). Acetobacter is propagated at 30° C. in YPG medium consisting of 5 g/L yeast extract, 2 g/L polypeptone, and 30 g/L glucose per liter, pH 6.5. Other rich and minimal Acetobacter media can be used including, for example, the minimal media described in U.S. Pat. No. 6,429,002 entitled “Reticulated cellulose-producing Acetobacter strains”.

### Example 4

### Fermentation Methods

[0158] In the case of an E. coli-based batch-fed fermentation system, microorganisms are also engineered to express umuC and umuD from E coli in pBAD24 under the prpBCDE promoter system through de vovo synthesis of this gene with the appropriate end-product production genes. For small scale fermentation, E. coli BL21(DE3) cells harboring pBAD24 (with ampicillin resistance and the end-product synthesis pathway) as well as pUMVC1 (with kanamycin resistance and the acetyl Co-A/malonyl CoA overexpression system) are incubated overnight at 37° C., shaken at over 200 RPM in 2 L flasks in 500 ml M9 medium in the presence of light, carbon dioxide, and supplemented with 75 μg/ml ampicillin and 50 μg/ml kanamycin until cultures reached an OD₆₀₀ of >0.8. Upon achieving an OD₆₀₀ of >0.8, cells are supplemented with 25 mM sodium propionate (pH 8.0) to activate the engineered-in gene systems for production as well as to stop cellular proliferation (through activation of umuC and umuD proteins). Induction is preferably performed for 6 hours at 30° C. After incubation, media is examined for product using GC-MS (as described in the section “Detection and Analysis of Gene and Cell Products”).

[0159] In a preferred embodiment, a fermentation is performed wherein the engineered cell takes light and carbon dioxide as its input and produces a desirable product. The carbon dioxide can be ambient sources, as well as concentrated sources, including stack gas, offgas from coal refineries, natural gas facilities, cement factories, or breweries. Carbon dioxide is added to the reaction chamber at a rate sufficient to maintain the reaction rate as desired. This may be neutral or positive pressure relative to the reaction chamber. In certain instances, the gas may require cleaning or scrubbing prior to addition into the reaction chamber

[0160] For large scale product fermentation, the engineered microorganisms are grown in 10 L, 100 L, 1000 L or larger batches, fermented and induced to express desired products based on the specific genes encoded in plasmids as appropriate. E. coli BL21(DE3) cells harboring pBAD24 (with ampicillin resistance and the end-product synthesis pathway) as well as pUMVC1 (with kanamycin resistance and the acetyl Co-A/malonyl CoA overexpression system) are incubated from a 500 ml seed culture for 10 L fermentations (5 L for 100 L fermentations) in M9 media in the presence of carbon dioxide and light at 37° C. shaken at >200 RPM until cultures reached an OD₆₀₀ of >0.8 (typically 16 hours) incubated with 50 μg/ml kanamycin and 75 μg/ml ampicillin. Media is continuously supplemented to maintain a 25 mM sodium propionate (pH 8.0) to activate the engineered-in gene systems for production as well as to stop cellular proliferation (through activation of umuC and umuD proteins). After the first hour of induction, aliquots of no more than 10% of the total cell volume are removed each hour and allowed to sit unagitated so as to allow the aqueous product to rise to the surface and undergo a spontaneous phase separation (if not possible, separation from media or cells is achieved as previously described). The hydrocarbon component is then collected and the aqueous phase returned to the reaction chamber. The reaction chamber is operated continuously. When the OD₆₀₀ drops below 0.6, the cells are replaced with a new batch grown from a seed culture.

### Example 5

### Engineering Light Capture

[0161] Light-induced proton motive force and subsequent ATP generation is assayed using several methods. First, light-dependent increases in survival is monitored in cells treated with the respiratory poison azide, as described in Walter et al, “Light-powering Escherichia coli with proteorhodopsin” PNAS (2007). 104(7):2408-2412. Second, a luciferase-based assay measuring cellular ATP levels is used to screen for cells with elevated ATP content specifically in response to light (a control is established using the same culture grown in dark); this assay is described in Martinez A et al; “Proteorhodopsin photosystem gene expression enables photophosphorylation in a heterologous host.” PNAS (2006). 104(13):5590-5595. For a full conversion, the light capture approach is combined with the CO₂ fixation approach through growth in minimal media only in presence of light.

[0162] A variety of microorganisms are known to encode light-activated proton translocation systems. In the present invention, one or more forms of light-activated proton pumps are functionally expressed in E. coli or other host cells to generate a proton gradient that is converted into ATP via an endogenous or exogenous ATPase.

[0163] Table 1 lists candidate genes for overexpression in the light capture/harvesting module together with information on associated pathways, Enzyme Commission (EC) Numbers, exemplary gene names, source organism, GenBank accession numbers, and homologs from alternate sources.

[0164] The proteorhodopsin (PR) gene is preferentially expressed in organisms. An exemplary PR sequence is locus ABL60988 described in Martinerz A, Bradley A S, Walbauer J R, Summons R E, DeLong E F. PNAS (2007). “Proteorhodopsin photosystem gene expression enables photophosphorylation in a heterologous host.” 104(13):5590-5595 with an amino acid sequence as set forth in SEQ ID NO: 1.

[0165] In addition, or as an alternative, a bacteriorhodopsin gene is expressed [Oesterhelt D, Stoeckenius W. Nature (1971) “Rhodopsin-like protein from the purple membrane of Halobacterium halobium.” 233:149-152]. An exemplary bacteriorhodopsin sequence is the NP_{—}280292 locus described in Ng W V et al. PNAS (2000). “Genome sequence of Halobacterium species NRC-1.” 97(22):12176-22181, with an amino acid sequence as set forth in SEQ ID NO: 2. Bacteriorhodopsin has previously been functionally expressed in yeast mitochondria [Hoffmann A, Hildebrandt V, Heberle J, Buldt G. “Photoactive mitochondria: In vivo transfer of a light-driven proton pump into the inner mitochondrial membrane of Schizosaccharomyces pombe.” Proc. Natl. Acad. Sci. (1994). 91: 9637-71].

[0166] Similarly, deltarhodopsin is expressed in addition to or as an alternative [Ihara K et al. J Mol Biol (1999). “Evolution of the archael rhodopsins: evolution rate changes by gene duplication and functional differentiation.” 285:163-174; Kamo N, Hashiba T, Kikukawa T, Araiso T, Ihara K, Nara T. Biochem Biophys Res Commun (2006). “A light-driven proton pump from Haloterrigena turkmenica: functional expression in Escherichia coli membrane and coupling with a H⁺ co-transporter.” 342(2): 285-90). An exemplary deltarhodopsin sequence is the AB009620 locus of Haloterrigena sp. Arg-4 described in Ihara K et al. J Mol Biol (1999). “Evolution of the archael rhodopsins: evolution rate changes by gene duplication and functional differentiation.” 285:163-174, with an amino acid sequence as set forth in SEQ ID NO: 3.

[0167] Similarly, the Leptosphaeria maculans opsin protein is expressed as an addition to or as an alternative to other proton pumps. An exemplary eukaryotic light-activated proton pump is opsin, accession AAG01180 from Leptosphaeria maculans, described in Waschuk S A, Benzerra A G, Shi L, and Brown L S. PNAS (2005). “Leptosphaeria rhodopsin: Bacteriorhodopsin-like proton pump from a eukaryote.” 102(19):6879-83], with an amino acid sequence as set forth in SEQ ID NO: 103.

[0168] Finally a xanthorhodopsin proton pump with a carotenoid antenna is expressed in addition to or as an alternative to other proton pumps (Balashov S P, Imasheva E S, Boichenko V A, Anton J, Wang J M, Lanyi J K. Science (2005) “Xanthorhodopsin: A proton pump with a light harvesting cartenoid antenna.” 309(5743): 2061-2064). An exemplary xanthorhodopsin sequence is locus ABC44767 from Salinibacter ruber DSM 13855 described in Mongodin E F et al. PNAS (2005). “The genome of Salinibacter ruber: Convergence and gene exchange among hyperhalophilic bacteria and archaea.” 102(50):18147-18152, with an amino acid sequence as set forth in SEQ ID NO: 4.

[0169] The pumps are used alone or in combination, optimized to the specific cell. The pumps can be directed to be incorporated into one or more than one membrane location, for example the cytoplasmic, outer membrane, or mitochondrial membrane. Xanthorhodopsin and proteorhodopsin co-expression represents an optimal combination.

[0170] In addition to the expression of one or more proton pumps described above, a retinal biosynthesis pathway can be expressed. When PR and the retinal biosynthetic operon are functionally expressed in E. coli, the pump is able to restore proton motive force to azide-treated E. coli populations [Walter J M, Greenfield D, Bustamante C, Liphardt J. PNAS (2007). “Light-powering Escherichia coli with proteorhodopsin.” 104(7):2408-2412]. A six gene retinal biosynthesis operon, Accession number EF100190 is known (Martinerz A, Bradley A S, Walbauer J R, Summons R E, DeLong E F. PNAS (2007). “Proteorhodopsin photosystem gene expression enables photophosphorylation in a heterologous host.” 104(13):5590-5595) which encodes amino acid sequences set forth in SEQ ID NO: 5 (Isopentenyl-diphosphate delta-isomerase (Idi), locus ABL60982), SEQ ID NO: 6 (15,15′-beta-carotene dioxygenase (Blh), locus ABL60983), SEQ ID NO: 7 (Lycopene cyclase (CrtY), locus ABL60984), SEQ ID NO: 8 (Phytoene synthase (CrtB), EC 2.5.1.32, locus ABL60985), SEQ ID NO: 9 (Phytoene dehydrogenase (CrtI), locus ABL60986), and SEQ ID NO: 10 (Geranylgeranyl pyrophosphate synthetase (CrtE), locus ABL60987).

[0171] The above 6 enzymes enable biosynthesis of retinal, which is the essential chromophore common to all rhodopsin-related proton pumps. In certain embodiments, additional spectral absorption is provided by carotenoids, as exemplified by the xanthorhodopsin pump and the C-40 salinixanthin antenna. In these embodiments, a beta-carotene ketolase (CrtO) is expressed, such as the crtO gene of the SRU_{—}1502 locus in Salinibacter ruber, described in Mongodin E F et al (2005), with an amino acid sequence as set forth in SEQ ID NO: 11. Other crtO genes include those from Rhodococcus erythropolis (AY705709), with an amino acid sequence as set forth in SEQ ID NO: 104, and Deinococcus radiodurans R1 (NP_{—}293819), with an amino acid sequence as set forth in SEQ ID NO: 122.

[0172] With a functional PR module expressed, the natural respiratory pathways are redundant. Thus, a plurality of endogenous genes can be disrupted including NADH dehydrogenase I (14 gene nuo operon, nuoA-N), NADH dehydrogenase II (ndh), and the cytochrome quinol oxidases (cyo and cyd).

[0173] Nuo proteins typically transfer electrons from NADH to ubiquinone in the electron transfer chain and produce a proton motive force. Mutants are typically deficient in energy generation and exhibit a significantly increased ratio of reduced (NADH) to oxidized (NAD⁺) pyridine nucleotide pools [Gennis R B and Stewart V. Respiration, p 217-261. In Neidhardt F C et al. Escherichia coli and Salmonella: cellular and molecular biology, vol 1. ASM Press, Washington D.C.; Claas K, Weber S, Downs D M. J Bacteriol (2000). “Lesions in the nuo operon, encoding NADH dehydrogenase complex I, prevent PurF-independent thiamine synthesis and reduce flux through the oxidative pentose phosphate pathway in Salmonella enterica serovar typhimurum.” 182(1):228-23]. The increased NADH concentration is important in the context of the present invention, because it provides the reducing power necessary for carbon fixation.

[0174] Proteorhodopsin Plasmid

[0175] The plasmid PtrcHis2origPR-N (pJB304), a pBR322-derivative with a beta-lactamase (bla) cassette bearing the SAR86 proteorhodopsin (PR) gene (Genbank: AF279106, (Beja, O., & others. (2000). Bacterial Rhodopsin: Evidence for a New Type of Phototrophy in the Sea. Science, 1902-1906) under the control of the Ptrc promoter, was provided by Jessica Walters and Jan Liphardt (University of California, Berkeley).

[0176] Phosphoribulokinase, RUBISCO Genes and Plasmids

[0177] The phosphoribulokinase gene prkA from Synechococcus sp. PCC7942 (Genbank: AB035257) was obtained from DNA 2.0 following codon optimization, checking for secondary structure effects, and removal of any unwanted restriction sites (SEQ ID NO 271). The gene was obtained with NcoI and BamHI restriction upstream of the gene and a HindIII restriction site downstream. The rbcL and rbcS genes from Synechococcus sp. PCC7942 (Genbank: NC_{—}006576) were also obtained from DNA 2.0 following codon optimization and correcting for secondary structure effects (see SEQ ID NOs 272-277). They were constructed in an operon with a NdeI site upstream of rbcL, SacI and SbfI restriction sites placed in between rbcL and rbcS, and a XhoI site placed downstream of rbcS. Another rbcL variant (rbcL1_{—}15) contained Met259Thr, a mutation which was shown to have five-fold greater specific activity in E. coli (Parikh, M. R., N., G. D., Woods, K. K., & Matsumura, I. (2006). Directed Evolution of RuBisCO hypermorphs through genetic selection in engineered E. coli. Protein Engineering, Design & Selection, 113-119) was made as well in the identical operon as rbcLS. prkA was digested with NcoI and BamHI and ligated into the MCS1 of a similarly-digested pCDFDuet-1 (Novagen, now EMD Chemicals) to yield pJB265. pCDFDuet-1 has a compatible origin of replication (CDF ori) and resistance cassette (aadA) for co-expression with PtrcHis2origPR-N. The rbcL1_{—}15S and rbcLS genes were cloned into MCS2 of pJB265 using the NdeI-XHoI sites to generate pJB267 and pJB268, respectively.

[0178] Strains

[0179] The E. coli strain BL21 DE(3) (Invitrogen) was used for expression studies, and the following strains were prepared by transformation of the respective plasmids into this host (Table 2):

TABLE 2

| BL21 DE(3) strains | Plasmids | Genes |
|---|---|---|
| JCC308 | pCDFDuet-1 | — |
| JCC309 | pJB285 | prkA |
| JCC311 | pJB267 | prkA, rbcL1_15S |
| JCC312 | pJB268 | prkA, rbcLS |
| JCC349 | pJB304, pCDFDuet-1 | PR, — |
| JCC351 | pJB304, pJB267 | PR, prkA, rbcL1_15S |
| JCC352 | pJB304, pJB268 | PR, prkA, rbcLS |

[0180] Expression of Proteorhodopsin

[0181] The strain JCC349 (pJB304, pCDFDuet-1) was induced at OD₆₀₀=0.1-0.2 with 0.1 mM IPTG in LB with 100 μg/ml carbenicillin and 50 μg/ml spectinomycin. Two cultures were induced, one with 20 μM trans-retinal added (from 20 mM trans-retinal in ethanol) and the other supplemented with an equal volume of ethanol, for a total of six hours. The cells were pelleted using a Sorvall RC6 Plus superspeed centrifuge (Thermo Electron Corp) and a F13S-14X50CY rotor (5000 rpm for 10 min). The cells induced with retinal present were red as expected with the proteorhodopsin holoprotein being present (Beja & others, 2000) and those cells induced without retinal present were white, indicating the presence of the apoprotein (Beja & others, 2000). Cells were resuspended in M9 minimal media/0.2% L-arabinose with 100 μg/ml carbenicillin and 50 μg/ml spectinomycin, and pelleted using an Eppendorf Centrifuge 5424 microcentrifuge (1 min, 15000 rpm). The M9 minimal media used in these experiments contained additional salt (5 g/L NaCl instead of 0.25 g) and iron (3 mg FeSO₄ heptahydrate/L). The cells were resuspended in M9/0.2% L-arabinose with 100 μg/ml carbenicillin and 50 μg/ml spectinomycin, and added to duplicate test tubes (Pyrex No. 9820, Fisher Scientific) equipped with a hollow glass rod and foam plug containing 20 mls of M9/0.2% L-arabinose, 100 μg/ml carbenicillin, 50 μg/ml spectinomycin and 0.1 mM IPTG at an OD₆₀₀=0.016. These cultures were incubated at 37° C. for 44 h. The cultures inoculated from retinal-containing culture were supplemented with 20 μM trans-retinal at t=0 and approximately every 12 h afterwards until the end of the experiment (t=44 h, OD₆₀₀=1.2-1.5, in stationary phase), while only the vector (ethanol) was added to the cultures inoculated from the other (retinal minus) induced culture at the same time. During this experiment, cultures were grown in aquaria at 37° C. with 1% CO₂/air bubbling through the glass rod at a rate of 1-2 bubbles/sec. After 44 h, the cultures containing trans-retinal were red (FIG. 4A) indicating that proteorhodopsin was still being expressed. A visible light absorbance scan was taken on a Spectramax M2 (Molecular Devices) from 400 to 750 nm on a retinal-supplemented culture using a retinal minus culture as the reference (blank), taking a reading every 5 nm (FIG. 4B). A broad peak with an absorbance maximum of approximately 520 nm was present, as expected for the proteorhodopsin holoprotein (Beja & others, 2000).

### Light Conferred Growth at an Elevated Salt Concentration

[0182] Seven green LED strips emitting at 518 nm (LB2-G12, superbrightleds.com) were connected in series and wired to a 12 VDC power supply (CPS-24, superbrightleds.com). The emitted light was measured using a LI-250A light meter (LI-COR) which can sense PAR (photosynthetically active radiation, 400-700 nm) was 20-80 μE/m²s as the meter was moved across the board at about 1 inch distance from the LED board. The LED board was attached to the side of an aquarium inside which test tube racks were placed to hold the test tubes containing cultures close to the lights (see FIG. 5A). The PAR received by a culture inside a glass tube illuminated by the LED board, measured by an immersible probe (Quantum Scalar Laboratory irradiance sensor, BioSpherical Instruments Inc.), varied from 20-30 μE/m²s as the sensor was moved from bottom to top of the glass tube. A culture of JCC349 (PR, pCDFDuet-1) was induced with 0.1 mM IPTG in the presence of 20 μM trans-retinal for 7 h in the manner described above, and innoculated at a starting OD₆₀₀=0.01 into two set of aquarium culture tubes containing 20 mls of M9 minimal media/0.2% L-arabinose, 0.1 mM IPTG and 20 μM trans-retinal. Both sets contained duplicate cultures with no additional salt, 0.3M sodium chloride, 0.5 M sodium chloride and 1M sodium chloride. One set was illuminated with the green LED bank described above, and the other set was kept in the dark in the same aquarium. The “dark” cultures did receive some ambient light, determined to be 0.5 μE/m²s when measured with the immersible sensor. All cultures were incubated at 37° C. and bubbled at a rate of 1-3 bubbles/sec with 1% CO₂/air. Trans-retinal was added to a concentration of 20 μM to each culture twice a day (about every 12 h). After 61 hours, the “light” cultures in M9 media and the media supplemented with 0.3 M sodium chloride grew, where the “dark” cultures only showed growth in the unsupplemented M9 media (FIGS. 5B, 5C). Optical densities at 600 nm were taken on a Spectramax M2 (Molecular Devices) for the cultures in M9 media and supplemented with 0.3 M NaCl (Table 3). 5 mls of each culture was pelleted, the media discarded, the cells washed in 1 ml milli-Q water (FIG. 5D), and the supernatant discarded. The pellets were then frozen, dried overnight under vacuum, and dry weights were recorded (Table 3).

TABLE 3
Table 3. OD₆₀₀ and dry weights of JCC349 grown in M9
minimal media and M9 supplemented with 0.3 M NaCl
under green light or in the dark.

| “Light” | | Dry weight | “Dark” | | Dry weight |
|---|---|---|---|---|---|
| culture | OD₆₀₀ | (mg/5 ml) | culture | OD₆₀₀ | (mg/5 ml) |
| M9 #1 | 1.3 | 2.7 | M9 #1 | 1.4 | 3.2 |
| M9 #2 | 1.4 | 2.9 | M9 #2 | 1.5 | 3.4 |
| 0.3M | 0.95 | 1.8 | 0.3M NaCl #1 | 0.08 | 0 |
| NaCl #1 | | | | | |
| 0.3M | 0.63 | 1.0 | 0.3M NaCl #2 | 0.08 | 0 |
| NaCl #2 | | | | | |

Expression of prkA and RUBISCO Genes in E. coli

[0183] Expression of phosphoribulokinase A, rbcL and rbcS has previously been demonstrated in E. coli. Expression of prkA is toxic, believed to be caused by a buildup of D-ribulose-1,5-bisphosphate which is not metabolized by E. coli (Parikh, N., Woods, & Matsumura, 2006). Expression of rbcLS with prkA allowed growth through production of 3-phosphoglycerate from D-ribulose-1,5-bisphosphate, but required CO₂ supplementation (Parikh, N., Woods, & Matsumura, 2006).

[0184] Strains JCC308 (pCDFDuet-1), JCC309 (prkA), JCC311 (prkA rbcL1_{—}15S), and JCC312 (prkA rbcLS) were induced in LB/spectinomycin (50 μg/ml) with 0.1 mM IPTG at an OD₆₀₀=0.2-0.4 for 3 hours. Cells were washed with M9/0.2% L-arabinose, and resuspended in 4 mls of M9/0.2% L-arabinose, spectinomycin (50 μg/ml), 0.1 mM IPTG. Cells were incubated for about 18 h in a shaking incubator at 37° C. and OD₆₀₀ values were recorded (FIG. 6A). The JCC309 cells which expressed prkA did not grow on L-arabinose, as expected (Parikh, N., Woods, & Matsumura, 2006). JCC312 also failed to grow, possibly due to insufficient levels of carbon dioxide being present for RbcLS to convert enough D-ribulose-1,5-bisphosphate to 3-phosphoglycerate for growth to occur. JCC311 did grow, suggesting that the optimized RbcLS enzyme (rbcL1_{—}15S) could metabolize enough D-ribulose-1,5-bisphosphate under these conditions to allow growth.

[0185] In order to test whether carbon dioxide supplementation would allow growth, JCC308 and JCC312 were induced in LB/spectinomycin (50 μg/ml) with 0.1 mM IPTG at an OD₆₀₀=0.2-0.4 for 3 hours. Cells were washed with M9/0.2% L-arabinose containing spectinomycin (50 μg/ml), and resuspended in 14 mls of M9/0.2% L-arabinose, spectinomycin (50 μg/ml) and 0.1 mM IPTG to an OD₆₀₀=0.04. 4 mls were incubated for about 18 h in a shaking incubator at 37° C. and 10 mls of each culture were incubated in a bubble tube at 37° C. where 1% CO₂/air was bubbled through at 1-2 bubbles/second. OD₆₀₀ values were recorded following the experiment (FIG. 6B). Comparison of the cultures grown under the different conditions showed that after 18 h JCC308 (pCDFDuet-1) and JCC312 (prkA rbcLS) had achieved approximately the same cell density when bubbled with 1% CO₂/air, but not in the culture tubes where JCC312 was 1/3 the density of JCC308. This is consistent with the previously reported research (Parikh, N., Woods, & Matsumura, 2006) that CO₂ supplementation is important for E. coli to grow when expressing prkA and rbcLS and growing on L-arabinose and verifies function of the enzymes.

Co-Expression of Proteorhodopsin, prkA and RUBISCO Genes in E. coli

[0186] JCC351 (PR prkA rbcL1_{—}15S) and JCC352 (PR prkA rbcLS) was induced and grown as described for JCC349 in Expression of Proteorhodopsin. After 44 h incubation in M9/0.2% arabinose, both JCC351 and JCC352 were red when supplemented with trans-retinal (for picture of JCC351 duplicates incubated with and without trans-retinal, see FIG. 7A) indicating that proteorhodopsin is expressed functionally when co-expressed with prkA and RUBISCO genes.

[0187] To test expression of prkA and rbcL1_{—}15S and effect of trans-retinal on growth, cultures of JCC349 (PR pCDFDuet-1), JCC351 (PR prkA rbcL1_{—}15S) and JCC352 (PR prkA rbcLS) were induced at OD₆₀₀=0.1-0.2 with 0.1 mM IPTG in LB with 100 μg/ml carbenicillin and 50 μg/ml spectinomycin. Two cultures were induced, one with 20 μM trans-retinal added (from 20 mM trans-retinal in ethanol) and the other supplemented with an equal volume of ethanol, for a total of 6 hours. The cells were pelleted using a Sorvall RC6 Plus superspeed centrifuge (Thermo Electron Corp) and a F13S-14X50CY rotor (5000 rpm for 10 min). The cells induced with retinal present were red as expected with the proteorhodopsin holoprotein being present (Beja & others, 2000) and those cells induced without retinal present were white, indicating the presence of the apoprotein (Beja & others, 2000). Cells induced were resuspended in M9 minimal media*/0.2% arabinose with 100 μg/ml carbenicillin and 50 μg/ml spectinomycin, and pelleted using an Eppendorf Centrifuge 5424 microcentrifuge (1 min, 15000 rpm). The cells were resuspended in M9/0.2% arabinose with 100 μg/ml carbenicillin and 50 μg/ml spectinomycin, and the cultures induced with retinal were added to test tubes (Pyrex No. 9820, Fisher Scientific) equipped with a hollow glass rod and foam plug containing 10 mls of M9/0.2% arabinose, 100 μg/ml carbenicillin, 50 μg/ml spectinomycin and 0.1 mM IPTG at an OD₆₀₀=0.02. ml cultures were started in the same media and placed in a 37° C. shaking incubator for both cultures induced in the presence and absence of trans-retinal at the same OD₆₀₀. During this experiment, cultures were grown in aquaria at 37° C. with 1% CO₂/air bubbling through the glass rod at a rate of 1-2 bubbles/sec. All cultures were incubated for 24 h, taking OD₆₀₀ measurements at t=15 h, 20 h and 24 h. The cultures inoculated from retinal-containing culture were supplemented with 20 μM trans-retinal at t=0 and approximately every 12 h afterwards until the end of the experiment (t=24 h) to check for red cell color, while only the vector (ethanol) was added to the cultures innoculated from the other (retinal minus) induced culture at the same time.

[0188] Growth in the aquarium bubble tubes followed the same trend as observed previously when the prkA and RUBISCO genes were expressed without proteorhodopsin, with JCC349 growing first followed by JCC351 and JCC352 (FIG. 7B). The same trend was observed in the culture tubes (FIG. 7C). Cultures grown with trans-retinal have similar growth curves with those lacking trans-retinal (FIG. 7C), confirming the assumption that addition of trans-retinal provides no growth benefit without light. Comparison of the JCC351 and JCC352 growth curves in the bubble tubes and culture tubes (FIG. 7D) revealed that the JCC351 came out of lag phase and reached stationary phase faster than the other three culture. This indicates that JCC351 (PR prkA rbcL1_{—}15S) has improved growth with supplemented CO₂, as would be expected for RUBISCO in the conversion of 3-phosphoglycerate from D-ribulose-1,5-bisphosphate (Parikh, N., Woods, & Matsumura, 2006). Less of an effect was noticed with JCC352 (PR prkA rbcLS), but the strain did appear to be growing slightly faster in the bubble tube than the culture tube.

Carbon Fixation Experiment in E. coli

[0189] In order to test for carbon fixation by JCC350 and JCC351, the cells are incubated in M9/0.2% L-arabinose with lower concentrations of ammonium chloride added (a condition known to trigger glycogen production in E. coli when nitrogen limitation is reached (for example, see Dietzler, D. N. (1973). Rates of Glycogen Synthesis and the Cellular Levels of ATP and FDP During Exponential Growth and Nitrogen-Limited Stationary Phase of Escherichia coli W4597 (K). Arch. Biochem. Biophys., 684-693.). ¹³C-labelled sodium bicarbonate is added to media, and uptake of ¹³CO₂ into glycogen via the gluconeogenesis pathway from 3-phosphoglycerate (the product of phosphoribulokinase A (prkA) and RUBISCO from D-ribulose-5-phosphate which is generated from L-arabinose metabolism by E. coli). Glycogen is isolated from these cells using a standard procedure of cell lysis with B-PER II (Pierce) and ethanol precipitation of glycogen after treatment with a DNase. The purified glycogen would be subjected to acid hydrolysis followed by ¹³C NMR and MS analysis to measure ¹³C incorporation in the obtained glucose. Two carbon positions in glucose are anticipated to be ¹³C-labelled in this approach (FIG. 8) leading to population of differently labeled glucose molecules (not considering α- and β-isomers). Without prkA and RUBISCO, L-arabinose would likely be incorporated into glycogen via the pentose phosphate pathway and this labeling pattern would be found.

### Example 6

### Engineering Carbon Fixation

[0190] Cells engineered to contain a functional CO₂ fixation pathway are selected for via growth in minimal media lacking an organic carbon source. Exemplary modes for supplying CO₂ include bubbling directly into media, aeration in the presence of a atmosphere containing concentrated CO₂, or via inclusion of bicarbonate in media formulations. While all cells will survive in rich media (such as LB or 2xYT) or in minimal media containing glucose or other organic carbon sources, only autotrophic cells will survive in minimal media containing CO₂ as the sole carbon source. Selection for autotrophic cells can be immediate (i.e., cells are plated or inoculated directly into minimal media) or can be gradual (i.e., cells are placed in a chemostat, and minimal media containing exogenous sugar is gradually replaced with minimal media containing only CO₂). In addition to survival-based selections, cells can be grown in minimal media in the presence of radiolabeled CO₂ (i.e., C¹⁴—CO₂). Detailed incorporation studies are employed to verify and characterize metabolic assimilation using common techniques known to those skilled in the art.

[0191] There are four known pathways that enable autotrophic carbon fixation. Cells are can be engineered to express the genes needed for the 3-hydroxyproprionate (3-HPA) cycle (FIG. 9, FIG. 10). Cells optionally can be engineered to express the genes needed for the reductive TCA cycle (FIG. 12). The genes encoding the reductive acetyl coenzyme A pathway (also known as Woods-Ljungdahl pathway) also can be engineered into cells (FIG. 11). Combinations of these (preferentially the 3-HPA cycle and the reductive TCA cycle) can also be engineered in special cases. Alternately, it is recognized that Rubisco and associated enzymes comprising the dark cycle of photosynthesis (also known as the reductive pentose phosphate cycle or the Calvin-Benson cycle) can be engineered into host organisms. However, given known problems related to efficiency and a reliance on extensively invaginated membrane structures, the reductive pentose phosphate cycle is not the preferred embodiment. Nonetheless, it is recognized that this cycle does represent an alternative to theoretically achieve the objective of enabling autotrophic carbon fixation.

[0192] Table 1 lists candidate genes for overexpression in the carbon fixation modules together with information on associated pathways, Enzyme Commission (EC) Numbers, exemplary gene names, source organism, GenBank accession numbers, and homologs from alternate sources.

[0193] I. Enzymes for a Functional 3-hydroxypropionate Cycle

[0194] The following enzyme activities are expressed in E. coli to establish a functional 3-hydroxypropionate cycle. This pathway is employed by Chloroflexus aurantiacus [Herter S, Farfsing J, Gad'On N, Rieder C, Eisenreich W, Bacher A, and Fuchs G. J Bacteriol (2001). “Autotrophic CO₂ fixation by Chloroflexus aurantiacus: study of glyoxylate formation and assimilation via the 3-hydroxypropionate cycle.” 183(14):4305-16] (FIG. 10).

[0195] Acetyl-CoA carboxylase (ACCase), (EC 6.4.1.2), generates malonyl-CoA, ADP, and Pi from Acetyl-CoA, CO₂, and ATP. E. coli encodes a heterohexameric acetyl-CoA carboxylase, though in preferred embodiments it is useful to overexpress these components to improve CO₂ fixation. In most preferred embodiments, when E. coli encodes an endogenous gene with the desired activity, it is useful to overexpress an exogenous gene, which allows for more explicit regulatory control in the fermentation and a means to potentially mitigate the effects of central metabolism regulation, which is focused around the native genes explicity. An exemplary ACCase subunit alpha is accA from E. coli, locus AAA70370 with an amino acid sequence as set forth in SEQ ID NO: 12. An exemplary ACCase subunit beta is accD from E. coli, locus AAA23807 with an amino acid sequence as set forth in SEQ ID NO: 13. An exemplary biotin-carboxyl carrier protein is accB from E. coli, locus ECOACOAC with an amino acid sequence as set forth in SEQ ID NO: 14. An exemplary biotin carboxylase is accC from E. coli, locus AAA23748 with an amino acid sequence as set forth in SEQ ID NO: 15.

[0196] Malonyl-CoA reductase (also known as 3-hydroxypropionate dehydrogenase) (EC 1.1.1.59), generates 3-hydroxyproprionate, 2 NADP⁺, and CoA from malonyl-CoA and 2 NADPH. An exemplary bifunctional enzyme with both alcohol and dehydrogenase activities is mcr from Chloroflexus aurantiacus, locus AY530019 with an amino acid sequence as set forth in SEQ ID NO: 16.

[0197] 3-hydroxypriopionyl-CoA synthetase (also known as 3-hydroxypropionyl-CoA dehydratase, or acryloyl-CoA reductase) generates propionyl-CoA, AMP, PPi (inorganic pyrophosphate), H₂O, and NADP⁺ from 3-hydroxypriopionate, ATP, CoA, and NADPH. An exemplary gene is propionyl-CoA synthase (pcs) from Chloroflexus aurantiacus, locus AF445079 with an amino acid sequence as set forth in SEQ ID NO: 17.

[0198] Propionyl-CoA carboxylase (EC 6.4.1.3) generates S-methylmalonyl-CoA, ADP, and Pi (inorganic phosphate) from Propionyl-CoA, ATP, and CO₂. An exemplary two subunit enzyme is propionyl-CoA carboxylase alpha subunit (pccA) from Roseobacter denitrificans, locus RD1_{—}2032 with an amino acid sequence as set forth in SEQ ID NO: 18 and propionyl-CoA carboxylase beta subunit (pccB) from Roseobacter denitrificans, locus RD1_{—}2028 with an amino acid sequence as set forth in SEQ ID NO: 19.

[0199] Methylmalonyl-CoA epimerase (EC 5.1.99.1) generates R-methylmalonyl-CoA from S-methylmalonyl-CoA. An exemplary enzyme from Rhodobacter sphaeroides is locus CP000661 with an amino acid sequence as set forth in SEQ ID NO: 20.

[0200] Methylmalonyl-CoA mutase (EC 5.1.99.2) generates succinyl-CoA from R-methylmalonyl-CoA. E. coli encodes an enzyme with this activity (yliK), though in preferred embodiments it is useful to overexpress this enzyme to improve CO₂ fixation. The yliK protein (locus NC000913.2) has an amino acid sequence as set forth in SEQ ID NO: 21.

[0201] Succinyl-CoA:L-malate CoA transferase generates L-malyl-CoA and succinate from succinyl-CoA and malate. An exemplary two subunit enzyme is SmtA from Chloroflexus aurantiacus, locus DQ472736.1 with an amino acid sequence as set forth in SEQ ID NO: 22 and SmtB from Chloroflexus aurantiacus, locus DQ472737.1 with an amino acid sequence as set forth in SEQ ID NO: 23.

[0202] Fumarate reductase (EC 1.3.1.6) generates fumarate and NADH from succinate and NAD⁺. Locus J01611 in E. coli is a fumarate reductase (frd) operon. In preferred embodiments, it is useful to overexpress these components to improve CO₂ fixation. The frdA fumarate reductase flavoprotein subunit has an amino acid sequence as set forth in SEQ ID NO: 24. It is important to note that some species may favor one direction over the other. Moreover, many of these proteins are present in organisms that express unidirectional and bidirectional versions. The frdB, fumarate reductase iron-sulfur subunit, has an amino acid sequence as set forth in SEQ ID NO: 25. The g15 subunit has an amino acid sequence as set forth in SEQ ID NO: 26. The g13 subunit has an amino acid sequence as set forth in SEQ ID NO: 27.

[0203] Fumarate hydratase (EC 4.2.1.2) generates malate from fumarate and water. E. coli encode three distinct fumarate hydratases, though in preferred embodiments overexpression of one or more facilitates CO₂ fixation. The class I aerobic fumarate hydratase (fumA), locus CAA25204, has an amino acid sequence as set forth in SEQ ID NO: 28. The class I anaerobic fumarate hydratase (fumB), locus AAA23827, has an amino acid sequence as set forth in SEQ ID NO: 29. The class II fumarate hydratase (fumC), locus CAA27698, has an amino acid sequence as set forth in SEQ ID NO: 30.

[0204] L-malyl-CoA lyase (EC 4.2.1.2) generates acetyl-CoA and glyoxylate from L-malyl-CoA. An exemplary gene is mclA from Roseobacter denitrificans, locus NC_{—}008209.1, having an amino acid sequence as set forth in SEQ ID NO: 31.

[0205] The above enzyme activities, listed in this section, confer on E. coli the ability to synthesize an organic 2-carbon glyoxylate molecule from 2 molecules of CO₂. The stoichiometry of this reaction is 2 CO₂+3 ATP+3 NADPH Glyoxylate+2 ADP+2 Pi+AMP+PPi+3 NADP.

[0206] II. Enzymes for a Functional Reductive TCA Cycle

[0207] The following enzyme activities are expressed in E. coli to establish a functional reductive TCA cycle (FIG. 12). This pathway is employed by Chlorobium tepidum.

[0208] ATP-citrate lyase (EC. 2.3.3.8) generates acetyl-CoA, oxaloacetate, ADP, and Pi from citrate, ATP, and CoA. An exemplary ATP citrate lyase is the two subunit enzyme from Chlorobium tepidum, comprising ATP citrate lyase subunit 1, locus CY1089, having an amino acid sequence as set forth in SEQ ID NO: 32 and ATP citrate lyase subunit 2, locus CT1088, having an amino acid sequence as set forth in SEQ ID NO: 33.

[0209] Hydrogenobacter thermophilus employs an alternate pathway to generate oxaloacetate from citrate. In a first step, the 2 subunit citryl-CoA synthetase generates citryl-CoA from citrate, ATP, and CoA. The large subunit, ccsA, locus BAD17844 has an amino acid sequence as set forth in SEQ ID NO: 34. The small subunit, ccsB, locus BAD17846 has an amino acid sequence as set forth in SEQ ID NO: 35.

[0210] The Hydrogenobacter thermophilus citryl-CoA ligase (ccl), locus BAD 17841, generates oxaloacetate and acetyl-CoA from citryl-CoA has an amino acid sequence as set forth in SEQ ID NO: 36.

[0211] Malate dehydrogenase (EC 1.1.1.37) generates malate and NAD from oxaloacetate and NADH. An exemplary malate dehydrogenase from Chlorobium tepidum is locus CAA56810 having an amino acid sequence as set forth in SEQ ID NO: 37.

[0212] Fumarase (also known as fumarate hydratase) (EC 4.2.1.2) generates fumarate and water from malate. E. coli encodes 3 different fumarase genes, though in preferred embodiments it is useful to overexpress one or more to improve CO₂ fixation. An exemplary E. coli fumarase hydratase class I, (aerobic isozyme) is fumA, having an amino acid sequence as set forth in SEQ ID NO: 38. An exemplary E. coli fumarate hydratase class I (anaerobic isozyme) is fumB, having an amino acid sequence as set forth in SEQ ID NO: 39. An exemplary E. coli fumarate hydratase class II is fumC, having an amino acid sequence as set forth in SEQ ID NO: 40.

[0213] Succinate dehydrogenase (EC 1.3.99.1) generates succinate and FAD from fumarate and FADH₂. E. coli encodes a four-subunit succinate dehydrogenase complex (SdhCDAB), though in preferred embodiments, it is useful to overexpress these components to improve CO₂ fixation. These enzymes are also used in the 3-HPA pathway above, but in the reverse direction. It is important to note that some species may favor one direction or the other. Succinate dehydrogenase and fumarate reductase are reverse directions of the same enzymatic interconversion, succinate+FAD⁺ fumarate+FADH₂. In Escherichia coli, the forward and reverse reactions are catalyzed by distinct complexes: fumarate reductase operates under anaerobic conditions and succinate dehydrogenase operates under aerobic conditions. This group also includes a region of the B subunit of a cytosolic archaeal fumarate reductase. The SdhA flavoprotein subunit, locus NP_{—}415251 has an amino acid sequence as set forth in SEQ ID NO: 41. The SdhB iron-sulfur subunit, locus NP_{—}415252 has an amino acid sequence as set forth in SEQ ID NO: 42. The SdhC membrane anchor subunit, locus NP_{—}415249 has an amino acid sequence as set forth in SEQ ID NO: 43. The SdhD membrane anchor subunit, locus NP_{—}415250 has an amino acid sequence as set forth in SEQ ID NO: 44.

[0214] Acetyl-CoA:succinate CoA transferase (also known as succinyl-CoA synthetase) (EC 6.2.1.5) generates succinyl-CoA, ADP, and Pi from succinate, CoA, and ATP. E. coli encodes a heterotetramer of two alpha and beta subunits, though in preferred embodiments it is useful to overexpress these subunits to optimize CO₂ fixation. An exemplary E. coli succinyl-CoA synthetase subunit alpha is sucD, locus AAA23900 having an amino acid sequence as set forth in SEQ ID NO: 45. An exemplary E. coli succinyl-CoA synthetase subunit beta is sucC, locus AAA23899 having an amino acid sequence as set forth in SEQ ID NO: 46. Chlorobium tepidum sucC (AAM71626), with an amino acid sequence as set forth in SEQ ID NO: 105, and sucD (AAM71515), with an amino acid sequence as set forth in SEQ ID NO: 106, may also be used.

[0215] 2-oxoketoglutarate synthase (also known as alpha-ketoglutarate synthase) (EC 1.2.7.3) generates alpha-ketoglutarate, CO₂, and oxidized ferredoxin from succinyl-CoA, CO₂, and reduced ferredoxin. An exemplary enzyme from Chlorobium limicola DSM 245 is a 4 subunit enzyme with accession numbers EAM42575 with an amino acid sequence as set forth in SEQ ID NO: 107; EAM42574 with an amino acid sequence as set forth in SEQ ID NO: 108; EAM42853 with an amino acid sequence as set forth in SEQ ID NO: 109; and EAM42852 with an amino acid sequence as set forth in SEQ ID NO: 110. This activity was functionally expressed in E. coli. Yun N R, Arai H, Ishii M, Igarashi Y. Biochem Biophys Res Communic (2001). The Genes for anabolic 2-oxoglutarate: Ferredoxin oxidoreductase from Hydrogenobacter thermophilus TK6. 282 (2): 589-594. There is another 5-subunit OGOR cluster in the same bacterium. Yun N R et al. Biochem Biophys Res Communic (2002). A novel five-subunit-type 2-oxoglutalate:ferredoxin oxidoreductases from Hydrogenobacter thermophilus TK-6. 292(1):280-6. The corresponding genes are for DABGE. An exemplary alpha-ketoglutarate synthase from Hydrogenobacter thermophilus is the heterodimeric enzyme that includes korA, locus AB046568:46-1869 with an amino acid sequence of: as set forth in SEQ ID NO: 47 and the korB locus AB046568:1883-2770 with an amino acid sequence of: as set forth in SEQ ID NO: 48.

[0216] Isocitrate dehydrogenase (EC 1.1.1.42) generates D-isocitrate and NADP+ from alpha-ketoglutarate, CO₂, and NADPH. An exemplary gene is the monomeric type idh from Chlorobium limicola, locus EAM42635 with an amino acid sequence of: as set forth in SEQ ID NO: 49. Another exemplary enzyme is that from Synechococcus sp WH 8102, icd, accession CAE06681, with an amino acid sequence as set forth in SEQ ID NO: 111.

[0217] In another embodiment, the NAD-dependent isocitrate dehydrogenase (EC 1.1.1.41) is expressed which generates isocitrate and NAD⁺ from alpha-ketoglutarate, CO₂, and NADH. An exemplary NAD-dependent enzyme is the two-subunit mitochondrial version from Saccharomyces cerevisiae. Subunit 1, idh1 locus YNL037C has an amino acid sequence as set forth in SEQ ID NO: 50. The second subunit, idh2, locus YOR136W has an amino acid sequence as set forth in SEQ ID NO: 51.

[0218] Aconitase (also known as aconitate hydratase or citrate hydrolyase) (EC 4.2.1.3) generates citrate from D-citrate via a cis-aconitate intermediate. E. coli encodes aconitate hydratase 1 and 2 (acnA and acnB), but in preferred embodiments it is useful to overexpress these enzymes to optimize CO₂ fixation. An exemplary aconitate hydrase 1 is E. coli acnA, locus b1276, having an amino acid sequence as set forth in SEQ ID NO: 52. An exemplary E. coli aconitate hydratase 2 is acnB, locus b0118, having an amino acid sequence as set forth in SEQ ID NO: 53.

[0219] Pyruvate synthase (also known as pyruvate:ferredoxin oxidoreductase) (EC 1.2.7.1) generates pyruvate, CoA, and an oxidized ferrodoxin from acetyl-CoA, CO₂, and a reduced ferredoxin. An exemplary pyruvate synthase is the tetrameric enzyme porABCD from Clostridium tetani E88, whereby subunit porA, locus AA036986 has an amino acid sequence as set forth in SEQ ID NO: 54; subunit porB, locus AA036985 has an amino acid sequence as set forth in SEQ ID NO: 55; subunit porC, locus AA036988 has an amino acid sequence as set forth in SEQ ID NO: 56; and subunit porD, locus AA036987 has an amino acid sequence as set forth in SEQ ID NO: 57.

[0220] Phosphoenolpyruvate synthase (also known as PEP synthase, pyruvate, water dikinase) (EC 2.7.9.2) generates phosphoenolpyruvate, AMP, and Pi from pyruvate, ATP, and water. E. coli encodes an exemplary PEP synthase, ppsA, though in preferred embodiments it is useful to overexpress ppsA to optimize CO₂ fixation. The E. coli ppsA enzyme, locus AAA24319 has an amino acid sequence as set forth in SEQ ID NO: 58. The corresponding enzyme from Aquifex aeolicus VF5 ppsA, locus AAC07865, with an amino acid sequence as set forth in SEQ ID NO: 112, may also be used.

[0221] Phosphoenolpyruvate carboxylase (also known as PEP carboxylase PEPCase, PEPC) (EC 4.1.1.31) generates oxaloacetate and Pi from phosphoenolpyruvate, water, and CO₂. E. coli encodes an exemplary PEP carboxylase, ppC, though in preferred embodiments it is useful to overexpress ppC to optimize CO₂ fixation. The E. coli ppC enzyme, locus CAA29332 has an amino acid sequence as set forth in SEQ ID NO: 59.

[0222] The above enzymes, described in this section, confer upon E. coli the ability to synthesize an organic 2-carbon acetyl-CoA molecule from 2 molecules of CO₂. The stoichiometry of this reaction is 2 CO₂+2 ATP+3 NADH+1 FADH₂+CoASH acetyl-CoA+2 ADP+2 Pi+AMP+PPi+FAD+3 NAD⁺.

[0223] III. Enzymes for a Functional Woods-Ljungdahl Cycle

[0224] The following enzyme activities are expressed in E. coli to establish a functional Woods-Ljungdahl pathway (FIG. 11). This pathway is employed by Moorella thermoacetica (previously known as Clostridium thermoaceticum), Methanobacterium thermoautrophicum, and Desulfobacterium autotrophicum.

[0225] NADP-dependent formate dehydrogenase (EC 1.2.1.4.3) generates formate and NADP⁺ from CO₂ and NADPH. An exemplary NADP-dependent formate dehydrogenase is the two-subunit Mt-fdhA/B enzyme from Moorella thermoacetica (previously known as Clostridium thermoaceticum) which contains Mt-fdhA, locus AAB18330, having an amino acid sequence as set forth in SEQ ID NO: 60 and the beta subunit, Mt-fdhB, locus AAB18329, having an amino acid sequence as set forth in SEQ ID NO: 61.

[0226] Formate tetrahydrofolate ligase (EC 6.3.4.3) generates 10-formyltetrahydrofolate, ADP, and Pi from formate, ATP, and tetrahydrofolate. An exemplary formate tetrahydrofolate ligase is from Clostridium acidi-urici, locus M21507, having an amino acid sequence as set forth in SEQ ID NO: 62. Alternate sources for this enzyme activity include locus AAB49329 from Streptococcus mutans (Swiss-Prot entry Q59925), with an amino acid sequence as set forth in SEQ ID NO: 113, or the protein with Swiss-Prot entry Q8XHL4 from Clostridium perfringens encoded by the locus BA000016, with an amino acid sequence as set forth in SEQ ID NO: 114.

[0227] Methenyltetrahydrofolate cyclohydrolase (also known as 5,10-methylenetetrahydrofolate dehydrogenase) (EC 3.5.4.9 and 1.5.1.5) generates 5,10-methylene-THF, water, and NADP from 10-formyltetrahydrofolate and NADPH via a 5,10-methyenyltetrahydrofolate intermediate. E. coli encodes a bifunctional methenyltetrahydrofolate cyclohydrolase/dehydrogenase, folD, though in preferred embodiments it is useful to overexpress this gene to optimize CO₂ fixation. The E. coli enzyme, locus AAA23803, has an amino acid sequence as set forth in SEQ ID NO: 63. Alternate sources for this enzyme activity include locus ABC 19825 (folD) from Moorella thermoacetica, with an amino acid sequence as set forth in SEQ ID NO: 115; locus AAO36126 from Clostridium tetani, with an amino acid sequence as set forth in SEQ ID NO: 116; and locus BAB81529 from Clostridium perfringens, with an amino acid sequence as set forth in SEQ ID NO: 117. All are bifunctional folD enzymes.

[0228] Methylene tetrahydrofolate reductase (EC 1.5.1.20) generates 5-methyltetrahydrofolate and NADP⁺ from 5,10-methylene-trahydrofolate and NADPH. E. coli encodes an exemplary methylene tetrahydrofolate reductase, metF, though in preferred embodiments it is useful to overexpress this gene to optimize CO₂ fixation. The E. coli enzyme, locus CAA24747, has an amino acid sequence as set forth in SEQ ID NO: 64. Alternative sources for this enzyme activity include bifunctional folD enzymes such as locus ABC 19825 (folD) from Moorella thermoacetica, with an amino acid sequence as set forth in SEQ ID NO: 115; locus AA036126 from Clostridium tetani, with an amino acid sequence as set forth in SEQ ID NO: 116; and locus BAB81529 from Clostridium perfringens, with an amino acid sequence as set forth in SEQ ID NO: 117; locus AAC23094 from Haemophilus influenzae, with an amino acid sequence as set forth in SEQ ID NO: 118; and locus CAA30531 from Salmonella typhimurium, with an amino acid sequence as set forth in SEQ ID NO: 119.

[0229] 5-methyltetrahydrofolate corrinoid/iron sulfur protein methyltransferase generates tetrahydrofolate and a methylated corrinoid Fe—S protein from 5-methyl-tetrahydrofolate and a corrinoid Fe—S protein. An exemplary gene, acsE, is encoded by locus AAA53548 in Moorella thermoacetica and has an amino acid sequence as set forth in SEQ ID NO: 65. This activity has been functionally expressed in E. coli (Roberts D L, Zhao S, Doukov T, and Ragsdale S. The reductive acetyl-CoA Pathway: Sequence and heterologous expression of active methyltetrahydrofolate:corrinoid/Urib-sulfur protein methyltransferase from Clostridium thermoaceticum. J. Bacteriol (1994). 176(19):6127-30). Another source for this activity is encoded by the acsE gene from Carboxydothermus hydrogenoformas locus CP000141, with an amino acid sequence as set forth in SEQ ID NO: 120.

[0230] Carbon monoxide dehydrogenase/acetyl-CoA synthase (EC 1.2.7.4/1.2.99.2 and 2.3.1.169) is a bifunctional two-subunit enzyme which generates acetyl-CoA, water, oxidized ferredoxin, and a corrinoid protein from CO₂, reduced ferredoxin, and a methylated corrinoid protein. An exemplary carbon monoxide dehydrogenase enzyme, subunit beta, is encoded by locus AAA23228 from Moorella thermoacetica and has an amino acid sequence as set forth in SEQ ID NO: 66. Another exemplary source of this activity is encoded by the acsB gene, locus CHY_{—}1222 from Carboxydothermus hydrogenoformase with protein accession YP_{—}360060, with an amino acid sequence as set forth in SEQ ID NO: 121. An exemplary acetyl-CoA synthase, subunit alpha, is locus AAA23229 from Moorella thermoacetica and has an amino acid sequence as set forth in SEQ ID NO: 67.

[0231] The above enzymes, described in this section, confer upon E. coli the ability to synthesize an organic 2-carbon acetyl-CoA molecule from 2 molecules of CO₂. The stoichiometry of this reaction is 2 CO₂+1 ATP+2 NADPH+2 reduced ferredoxins+coenzyme A acetyl-CoA+2H₂O+ADP+Pi+2 NADP⁺+2 oxidized ferredoxins.

[0232] IV. Additional Carbon Fixation Pathway Genes

[0233] In addition to the enzymes above, cells may be engineered to fix carbon by incorporating wild-type or codon optimized nucleic acids expressing Salinibacter fructose-bisphosphate aldolase, Synechococcus sp. 7002 fructose-bisphosphate aldolase (class I), Synechococcus elongatus PCC 7942 sedoheptulose-1,7-bisphosphatase, and/or T. elongatus BP-1 sedoheptulose-1,7-bisphosphatase (see, e.g., SEQ ID NOs 261-270).

### Example 7

### Engineering the Glyoxylate Shunt

[0234] The enzymes described earlier provide pathways to assimilate CO₂ into the 2-carbon acetyl-CoA (reductive TCA and Woods-Ljungdahl pathways) or glyoxylate (3-HPA pathway). Combinations of these (preferentially the 3-HPA cycle and the reductive TCA cycle) are also engineered in special cases. In this scenario, the outputs of the CO₂ fixation reactions (acetyl-CoA and glyoxylate) are utilized as inputs for the glyoxylate cycle (FIG. 15), which combines acetyl-CoA and glyoxylate into 4-carbon oxaloacetate (via a 4-carbon malate intermediate) [Chung T, Klumpp D J, Laporte D C. J Bacteriol (1988). “Glyoxylate bypass operon of Escherichia coli: cloning and determination of the functional map.” 170(1):386-92.]

[0235] Three key enzymes are involved in the Escherichia coli glyoxylate shunt pathway. In preferred embodiments, all are overexpressed to maximize CO₂ fixation.

[0236] Malate synthase (EC 2.3.3.9) generates malate and coenzyme A from acetyl-CoA, water, and glyoxylate. An exemplary enzyme is encoded by E. coli locus JW3974 (aceB) with an amino acid sequence as set forth in SEQ ID NO: 68. Another exemplary activity is provided by an alternate malate synthase enzyme E. coli encodes, the JW2943 locus malate synthase G (glcB), having an amino acid sequence as set forth in SEQ ID NO: 69.

[0237] Isocitrate lyase (EC 4.1.3.1) generates glyoxylate and succinate from isocitrate. An exemplary enzyme is that encoded by E. coli locus JW3975 (aceA) having an amino acid sequence as set forth in SEQ ID NO: 70. Although isocitrate lyase is critical for E. coli's endogenous glyoxylate bypass, this activity does not need to be overexpressed in practicing the instant invention. The enzyme's main purpose in the pathway is to generate glyoxylate, which can instead be supplied via the engineered 3-HPA pathway.

[0238] Malate dehydrogenase (EC 1.1.1.37) generates oxaloacetate and NADH from malate and NAD⁺. An exemplary enzyme is that encoded by E. coli locus JW3205 (mdh) with an amino acid sequence as set forth in SEQ ID NO: 71.

### Example 8

### Engineering Gluconeogenesis

[0239] Gluconeogenesis is the process by which organisms generate glucose from non-sugar carbon substrates, including pyruvate, lactate, glycerol, and glucogenic amino acids. Most steps of glycolysis are bidirectional, with three exceptions (reviewed in Hers H G, Hue, L. Ann Rev. Biochem (1983). “Gluconeogenesis and related aspects of glycolysis.” 52:617-53). These enzyme activities are expressed to enable gluconeogenesis in E. coli (FIG. 13).

[0240] I. Conversion of Pyruvate to Phosphoenolpyruvate

[0241] Conversion of pyruvate to phosphoenolpyruvate requires two enzymatic activities as follows.

[0242] Pyruvate carboxylase (EC 6.4.4.1) generates oxaloacetate, ADP, and Pi from pyruvate, ATP, and CO₂. An exemplary pyruvate carboxylase is encoded by the YGL062W locus from Saccharomyces cerevisiae, pyc1, and has an amino acid sequence as set forth in SEQ ID NO: 72.

[0243] Phosphoenolpyruvate carboxykinase (EC 4.1.1.49) generates phosphoenolpyurate, ADP, Pi, and CO₂ from oxaloacetate and ATP. An exemplary phosphoenolpyruvate carboxykinase is encoded by E. coli locus JW3366, pckA, and has an amino acid sequence as set forth in SEQ ID NO: 73.

[0244] II. Conversion of Fructose 1,6-bisphosphate to Fructose-6-phosphate

[0245] Conversion of fructose 1,6-bisphosphate to fructose-6-phosphate requires fructose-1,6-bisphosphatase (EC 3.1.3.11), which generates fructose-6-phosphate and Pi from fructose-1,6-bisphosphate and water. An exemplary fructose-1,6-bisphosphatase is encoded by E. coli locus JW4191, fbp, and has an amino acid sequence as set forth in SEQ ID NO: 74.

[0246] III. Conversion of Glucose-6-phosphate to Glucose

[0247] Conversion of glucose-6-phosphate to glucose requires glucose-6-phosphatase (EC 3.1.3.68), which generates glucose and Pi from glucose-6-phosphate and water. An exemplary glucose-6-phosphatase is encoded by the Saccharomyces cerevisiae YHR044C locus, dog1, and has an amino acid sequence as set forth in SEQ ID NO: 75. Another exemplary glucose-6-phosphatase activity is encoded by Saccharomyces cerevisiae YHR043C locus, dog2, and has an amino acid sequence as set forth in SEQ ID NO: 76.

[0248] Oxaloacetate, the starting material for gluconeogenesis, is generated either via the glyoxylate shunt (leveraging inputs from the reductive TCA or Woods-Ljungdahl pathways and the 3-HPA pathway) or via the carboxylation of pyruvate. In the absence of the glyoxylate shunt, the pyruvate synthase activity of pyruvate ferredoxin:oxidoreductase (EC 1.2.7.1) can generate pyruvate, CoA, and oxidized ferredoxin from acetyl-CoA, CO₂, and reduced ferredoxin [Furdui C and Ragsdale S W. J. Biol. Chem. (2000). “The role of pyruvate ferredoxin oxidoreductase in pyruvate synthesis during autotrophic growth by the Woods-Ljungdahl pathway.” 275(37): 28494-99] (FIG. 14). An exemplary pyruvate ferredoxin oxidoreductase with pyruvate synthase activity is encoded by locus Moth-0064 from Moorella thermoaceticum, and has an amino acid sequence as set forth in SEQ ID NO: 77.

### Example 9

### Engineering Reducing Power

[0249] The above CO₂-fixation pathways require reducing power, primarily in the form of NADH and NADPH. Maintaining an appropriately-balanced supply of reduced NAD⁺ (NADH) and NADP⁺ (NADPH) is important to maximize carbon assimilation, and thus growth rate, of engineered E. coli.

[0250] Table 1 lists candidate genes for overexpression in the reducing power module together with information on associated pathways, Enzyme Commission (EC) Numbers, exemplary gene names, source organism, GenBank accession numbers, and homologs from alternate sources. FIG. 17, FIG. 18, and FIG. 19 show possible mechanisms to generate reducing power.

[0251] I. NADH

[0252] As described in the section on engineering light capture, disruption of endogenous nuo and/or ndh loci significantly increases the intracellular ratio of NADH:NAD⁺. When NADH levels remain suboptimal, a plurality of additional methods is employed including overexpression of the following genes.

[0253] NAD⁺-dependent isocitrate dehydrogenase (EC 1.1.1.41) generates 2-oxoglutarate, CO₂, and NADH from isocitrate and NAD⁺. Of note, most bacterial isocitrate dehydrogenases are NADP⁺-dependent (EC 1.1.1.42). An exemplary NAD⁺-dependent isocitrate dehydrogenase is the octameric Saccharomyces cerevisiae enzyme comprising locus YNL037C, idh1, encoding a protein having the amino acid sequence as set forth in SEQ ID NO: 78 and locus YOR136W, idh2, encoding a protein having an amino acid sequence as set forth in SEQ ID NO: 79.

[0254] Malate dehydrogenase (EC 1.1.1.37) generates oxaloacetate and NADH from malate and NAD⁺. As described above, this enzyme is overexpressed in embodiments leveraging the glyoxylate shunt. Irrespective of the employment of the glyoxylate shunt, overexpression of NAD-dependent malate dehydrogenase can be employed to increase NADH pools. An exemplary enzyme is encoded by E. coli locus JW3205 (mdh) and has an amino acid sequence as set forth in SEQ ID NO: 80.

[0255] The NADH:ubiquinone oxidoreductase from Rhodobacter capsulatus, is unique in its ability to reverse electron flow between the quinone pool and NAD⁺ [Dupuis A, Peinnequin A, Darrouzet E, Lunardi J. FEMS Microbiol Lett (1997). “Genetic disruption of the respiratory NADH-ubiquinone reductase of Rhodobacter capsulatus leads to an unexpected photosynthesis-negative phenotype.” 149:107-114; Dupuis A, Darrouzet E, Duborjal H, Pierrard B, Chevallet M, van Belzen R, Albracht S P J, Lunardi J. Mol. Microbiol. (1998). “Distal genes of the nuo-operon of Rhodobacter capsulatus equivalent to the mitochondrial ND subunits are all essential for the biogenesis of the respiratory NADH-ubiquinone oxidoreductase. 28:531-541]. E. coli nuo can be knocked out as a means to increase NADH amounts. The Rhodobacter Nuo operon, encoding the Nuo Complex I, can be reconstituted to generate additional NADH by reverse electron flow.

[0256] The Rhodobacter capsulatus nuo operon, locus AF029365, consisting of the 14 nuo genes nuoA-N (and 7 ORFs of unknown function) can be expressed to enable reverse electron flow and NADH-generation in E. coli. The operon encodes NuoA, accession AAC24985.1, having an amino acid sequence as set forth in SEQ ID NO: 81; NuoB, accession AAC24986.1, having an amino acid sequence as set forth in SEQ ID NO: 82; NuoC, accession AAC24987.1, having an amino acid sequence as set forth in SEQ ID NO: 83; NuoD, accession AAC24988.1, having an amino acid sequence as set forth in SEQ ID NO: 84; NuoE, accession AAC24989.1, having an amino acid sequence as set forth in SEQ ID NO: 85; NuoF, accession AAC24991.1, having an amino acid sequence as set forth in SEQ ID NO: 86; NuoG, accession AAC24995.1 has an amino acid sequence as set forth in SEQ ID NO: 87; NuoH, accession AAC24997.1, having an amino acid sequence as set forth in SEQ ID NO: 88; NuoI, accession AAC24999.1, having an amino acid sequence as set forth in SEQ ID NO: 89; NuoJ, accession AAC25001.1, having an amino acid sequence as set forth in SEQ ID NO: 90; NuoK, accession AAC25002.1, having an amino acid sequence as set forth in SEQ ID NO: 91; NuoL, accession AAC25003.1, having an amino acid sequence as set forth in SEQ ID NO: 92; NuoM, accession AAC25004.1, having an amino acid sequence as set forth in SEQ ID NO: 93; and NuoN, accession AAC25005.1, having an amino acid sequence as set forth in SEQ ID NO: 94.

[0257] Expression of pyridine nucleotide transhydrogenase (EC 1.6.1.1) generates NADH and NADP⁺ from NADPH and NAD⁺. An exemplary enzyme is the E. coli soluble pyridine nucleotide transhydrogenase, encoded by sthA (also known as udhA), locus JW551, having an amino acid sequence as set forth in SEQ ID NO: 100. An alternate exemplary enzyme is the membrane bound E. coli pyridine nucleotide transhydrogenase, encoded by the multisubunit of NAD(P) transhydrogenase subunit alpha, encoded by pntA, locus JW1595, having an amino acid sequence as set forth in SEQ ID NO: 101 and NADP transhydrogenase subunit beta, encoded by pntB, locus JW1594, with an amino acid sequence as set forth in SEQ ID NO: 102.

[0258] II. NADPH

[0259] NADPH serves as an electron donor in reductive (especially fatty acid) biosynthesis. Three parallel methods are used, singly or in combination, to maintain sufficient NADPH levels for photoautotrophy. Methods 1 and 2 are described in WO2001/007626, Methods for producing L-amino acids by increasing cellular NADPH. Method 3 is described in U.S. Pub. No. 2005/0196866, Increasing intracellular NADPH availability in E. coli.

[0260] A. Increasing the Flux Through the Pentose Phosphate Pathway

[0261] Increasing the flux through the Pentose Phosphate Pathway generates 2 molecules of NADPH per molecule of glucose (FIG. 16).

[0262] The inactivation of the E. coli phosphoglucose isomerase, pgi, locus JW3985, is known to force glucose through the pentose phosphate pathway. This therefore provides one approach for increasing intracellular NADPH pools [Kabir, M M. Shimizu, K. Appl. Microbiol. Biotechnol. (2003):Fermentation characteristics and protein expression patterns in a recombinant Escherichia coli mutant lacking phosphoglucose isomerase for poly(3-hydroxybutyrate) production.” 62:244-255; Kabir M M, Shimizu K. J. Biotechnol (2003). “Gene expression patterns for metabolic pathway in pgi knockout Escherichia coli with and without phb genes based on RT-PCR” 105(1-2):11-31.]

[0263] Overexpression of glucose-6-phosphate dehydrogenase (EC 1.1.1.49), which generates NADPH and 6-phospho-gluconolactone from glucose-6-phosphate and NADP⁺, provides another way to increase NADPH levels. An exemplary enzyme is that encoded by E. coli glucose-6-phosphate dehydrogenase, zwf locus JW1841 and having an amino acid sequence as set forth in SEQ ID NO: 95.

[0264] Overexpression of 6-phosphogluconolactonase (EC 3.1.1.31), which generates 6-phosphogluconate from 6-phosphoglucolactone and water, provides another approach for increasing flux through the pentose phosphate pathway. An exemplary enzyme is that encoded by the E. coli 6-phosphogluconolactonase, pgl, locus JW0750, having an amino acid sequence as set forth in SEQ ID NO: 96.

[0265] Overexpression of 6-phosphogluconate dehydrogenase (EC 1.1.1.44) generates ribose-5-phosphate, CO₂, and NADPH from 6-phosphogluconate and NADP⁺. This also can be used to increase NADPH levels by increasing flux through the pentose phosphate pathway. An exemplary enzyme is the encoded by E. coli 6-phosphogluconate dehydrogenase, gnd, locus JW2011, having an amino acid sequence as set forth in SEQ ID NO: 97.

[0266] B. Expression of NADP⁺-Dependent Enzymes

[0267] NADP⁺-dependent enzymes can be expressed in lieu of or in addition to NAD-dependent enzymes.

[0268] Overexpression of isocitrate dehydrogenase (EC 1.1.1.42) generates 2-oxoglutarate, CO₂, and NADPH from isocitrate and NADP⁺. An exemplary enzyme is encoded by the E. coli isocitrate dehydrogenase, icd, locus JW1122, and has an amino acid sequence as set forth in SEQ ID NO: 98.

[0269] Overexpression of malic enzyme (EC 1.1.1.40) generates pyruvate, CO₂, and NADPH from malate and NADP⁺. An exemplary NADP-dependent enzyme is the E. coli malic enzyme, encoded by maeB, locus JW2447, having an amino acid sequence as set forth in SEQ ID NO: 99.

[0270] C. Expression of Pyridine Nucleotide Transhydrogenase

[0271] Expression of pyridine nucleotide transhydrogenase (EC 1.6.1.1) generates NADPH and NAD⁺ from NADH and NADP⁺. An exemplary enzyme is the E. coli soluble pyridine nucleotide transhydrogenase, encoded by sthA (also known as udhA), locus JW551, having an amino acid sequence as set forth in SEQ ID NO: 100. An alternate exemplary enzyme is the membrane bound E. coli pyridine nucleotide transhydrogenase, encoded by the multisubunit of NAD(P) transhydrogenase subunit alpha, encoded by pntA, locus JW1595, having an amino acid sequence as set forth in SEQ ID NO: 101 and NADP transhydrogenase subunit beta, encoded by pntB, locus JW1594, with an amino acid sequence as set forth in SEQ ID NO: 102.

### Example 10

### Engineering Carbon Acetyl-coA Flux

[0272] In some embodiments of the present invention, methods may be employed to overexpress pantothenate kinase, encoded by panK, locus AAC76952 and/or pyruvate dehydrogenase, encoded by aceE, locus AAC73225 and aceF, locus NP_{—}414657 as a means of raising acetyl-CoA levels and, optionally, increasing overall fatty acid production [Vadali R V, Bennett G N, San K Y. Applicability of CoA/acetyl-CoA manipulation system to enhance isoamyl acetate production in Escherichia coli. Metab Eng. 2004 October; 6(4):294-9]. Additional approaches may include the downregulation, inhibition, or knocking out of acyl coenzyme A dehydrogenase, encoded by fadE, locus NP_{—}414756, biosynthetic glycerol 3-phosphate dehydrogenase, GpsA, locus BAE77684, lactate dehydrogenase, encoded by ldhA. Locus NP_{—}415898, formate acetyltransferase 1, encoded by pflb, locus NP_{—}415-423, alcohol dehydrogenase, encoded by adhE, locus NP_{—}415757. phosphotransacetylase, encoded by PTA, locus NP_{—}416800, pyruvate oxidase, encoded by poxB, locus AAB31180, and acetate kinase, encoded by ackA and ackB, locus NP_{—}416799. Additional methods include overexpressing accABCD (encoding acetyl co-A carboxylase), aceEF (encoding the E1p dehydrogase component and the E2p dihydrolipoamide acyltransferase component of the pyruvate and 2-oxoglutarate dehydrogenase complexes), fabH/fabD/fabG/acpP/fabF (encoding FAS), fatty-acyl-coA reductases and aldehyde decarbonylases as well as limiting the cellular supply of glycerol (to less than 1% w/v of the medium). In some embodiments, such methods may increase expression of a heterologous DNA sequence in the host cell by 2-fold, as compared with the wild-type host cell. In other embodiments, such methods may increase expression of a heterologous DNA sequence in the host cell by 5-fold. In further embodiments, such methods may increase expression of a heterologous DNA sequence in the host cell by 10-fold. In other embodiments, such methods may increase expression of a heterologous DNA sequence in the host cell by 100-fold. In further embodiments, such methods may increase expression of a heterologous DNA sequence in the host cell by 1000-fold.

[0273] In other embodiments, methods may be employed to increase or improve fatty acid production in a synthetophototrophic cell. Increased flux through acetyl-CoA and malonyl-CoA maximizes hydrocarbon and/or hydrocarbon precursor production.

[0274] A series of modifications are carried out in order to obtain acetyl CoA/malonyl CoA/fatty acid overproducers. For example, to increase flux through acetyl-CoA, a biosynthetic pathway is introduced via a plasmid, cosmid, fosmid, or BAC that encodes PDH, PanK, aceEF, (encoding the E1p dehydrogenase component and the E2p dihydrolipoamide acyltransferase component of the pyruvate and 2-oxoglutarate dehydrogenase complexes), fabH/fabD/fabG/acpP/fabF (encoding FAS), and potentially additional DNA encoding fatty-acyl-coA reductases and aldehyde decarbonylases, each under the control of a constitutive promoter, from Codon Devices (Cambridge, Mass.). The sequences of all these genes can be found at http://www.ncbi.nlm.nih.gov/entrez/query.fcgi?CMD=search&DB=nucleotide). Subsequently, FadE, GpsA, LdhA, pflb, adhE, PTA, poxB, ackA, and/or ackB may be knocked out of the engineered microbe by transformation with plasmids containing null mutations of the corresponding genes or other methods known to those skilled in the art. The sequences of all these genes can be found at http://www.ncbi.nlm.nih.gov/entrez/query.fcgi?CMD=search&DB=nucleotide).

[0275] The resulting synthetophototrophic organisms may be grown in the presence of light and carbon dioxide under conditions to sufficient to synthesize hydrocarbon products or precursors. As such, these microorganisms will have increased acetyl CoA production levels. Malonyl CoA overproduction may be effected by engineering the microorganism as described above, with DNA encoding accABCD (acetyl CoA carboxylase) included in the plasmid synthesized de novo. Fatty acid overproduction may be achieved by further including DNA encoding lipase in the plasmid synthesized de novo. For various length precursors, specific other genes may be knocked out. For C18, AF503757 (which uses C20-ACP) may be knocked out and POADA1 (which uses C16-ACP) may be included in the synthesized plasmid. For C16, AF503757 and POADA1 may be knocked out and Q39473 (which uses C14-ACP) may be included in the synthesized plasmid. For C14, Q39473, AF503757 and POADA1 may be knocked out, and AAA34215 (which uses C12-ACP) may be included in the synthesized plasmid. Acetyl CoA, malonyl CoA, and/or fatty acid overproduction can be verified by using radioactive precursors, HPLC, and GC-MS subsequent to cell lysis.

[0276] Knocking out lactate and acetate production in Clostridium thermocellum has been demonstrated to increase the total amount of ethanol production without reducing the total carbon progressing through the common biosynthetic pathway (Shaw, J., et al., “Metabolic Engineering of the Xylose Utilizing Thermophile Thermoanaerobacterium saccharolyticum JW/SL-YS485 for Ethanol Production.” presented at AICHE Annual Meeting).

[0277] In some embodiments Acetyl-CoA carboxylase (ACC) or Malonyl-CoA decarboxylase may be overexpressed in order to increase the intracellular concentration thereof by at least 2-fold. In a preferred embodiment, Acetyl-CoA carboxylase (ACC) or Malonyl-CoA decarboxylase may be overexpressed in order to increase the intracellular concentration thereof by at least 5-fold. In a more preferred embodiment, Acetyl-CoA carboxylase (ACC) or Malonyl-CoA decarboxylase may be overexpressed so as to increase the intracellular concentration thereof by at least 10-fold.

[0278] In some embodiments, the intracellular concentration (e.g., the concentration of the intermediate in the genetically modified host cell) of the biosynthetic pathway intermediate may be increased to further boost the yield of the final product. The intracellular concentration of the intermediate can be increased in a number of ways, including, but not limited to, increasing the concentration in the culture medium of a substrate for a biosynthetic pathway; increasing the catalytic activity of an enzyme that is active in the biosynthetic pathway; increasing the intracellular amount of a substrate (e.g., a primary substrate) for an enzyme that is active in the biosynthetic pathway; and the like.

[0279] Table 4, which follows, briefly describes each of the sequences in the formal sequence listing filed with this application.

TABLE 4

| SEQ ID NO: | Description of Sequence |
|---|---|
| 1 | Amino acid sequence of a proteorhodopsin (locus ABL60988) |
| 2 | Amino acid sequence of a bacteriorhodopsin (locus NP_280292) |
| 3 | Amino acid sequence of a deltarhodopsin (locus AB009620) |
| 4 | Amino acid sequence of a xanthorhodopsin (locus ABC44767) |
| 5 | Amino acid sequence of a isopentenyl-diphosphate delta-isomerase (Idi) (locus |
| | ABL60982) |
| 6 | Amino acid sequence of a 15,15′-beta-carotene dioxygenase (Blh) (locus ABL60983) |
| 7 | Amino acid sequence of a lycopene cyclase (CrtY) (locus ABL60984) |
| 8 | Amino acid sequence of a phytoene synthase (CrtB) (EC 2.5.1.32) (locus ABL60985) |
| 9 | Amino acid sequence of a phytoene dehydrogenase (CrtI) (locus ABL60986) |
| 10 | Amino acid sequence of a geranylgeranyl pyrophosphate synthetase (CrtE) (locus |
| | ABL60987) |
| 11 | Amino acid sequence of a beta-carotene ketolase (CrtO) (locus SRU_1502) |
| 12 | Amino acid sequence of a acetyl-CoA carboxylase subunit alpha (AccA) (locus |
| | AAA70370) |
| 13 | Amino acid sequence of a acetyl-CoA carboxylase subunit beta (accD) (locus AAA23807) |
| 14 | Amino acid sequence of a biotin-carboxyl carrier protein (AccB) (locus ECOACOAC) |
| 15 | Amino acid sequence of a biotin carboxylase (AccC) (locus AAA23748) |
| 16 | Amino acid sequence of a malonyl-CoA reductase (Mcr) (locus AY530019) |
| 17 | Amino acid sequence of a propionyl-CoA synthase (Pcs) (locus AF445079) |
| 18 | Amino acid sequence of a propionyl-CoA carboxylase alpha subunit (PccA) (locus |
| | RD1_2032) |
| 19 | Amino acid sequence of a propionyl-CoA carboxylase beta subunit (PccB) (RD1_2028) |
| 20 | Amino acid sequence of a methylmalonyl-CoA epimerase (EC 5.1.99.1) (locus CP000661) |
| 21 | Amino acid sequence of a methylmalonyl-CoA mutase (EC 5.1.99.2) (YliK) (locus |
| | NC000913.2) |
| 22 | Amino acid sequence of a succinyl-CoA:L-malate CoA transferase (SmtA) (locus |
| | DQ472736.1) |
| 23 | Amino acid sequence of a succinyl-CoA:L-malate CoA transferase (SmtB) (locus |
| | DQ472737.1) |
| 24 | Amino acid sequence of a fumarate reductase (EC 1.3.1.6) (FrdA fumarate reductase |
| | flavoprotein subunit) (AAA23437.1) |
| 25 | Amino acid sequence of a fumarate reductase (EC 1.3.1.6) (FrdB, fumarate reductase iron- |
| | sulfur subunit) (EAY46226.1) |
| 26 | Amino acid sequence of a fumarate reductase (EC 1.3.1.6) (g15 subunit) (locus |
| | NP_290787.1) |
| 27 | Amino acid sequence of a fumarate reductase (EC 1.3.1.6) (g13 subunit) (locus |
| | NP_757087.1) |
| 28 | Amino acid sequence of a fumarate hydratase (EC 4.2.1.2) (class I aerobic fumarate |
| | hydratase) (FumA) (locus CAA25204) |
| 29 | Amino acid sequence of a fumarate hydratase (EC 4.2.1.2) (class I anaerobic fumarate |
| | hydratase) (FumB) (locus AAA23827) |
| 30 | Amino acid sequence of a fumarate hydratase (EC 4.2.1.2) (class II fumarate hydratase) |
| | (FumC) (locus CAA27698) |
| 31 | Amino acid sequence of a L-malyl-CoA lyase (EC 4.2.1.2) (MclA) (locus NC_008209.1) |
| 32 | Amino acid sequence of a ATP-citrate lyase (EC. 2.3.3.8) (ATP citrate lyase subunit 1) |
| | (locus CY1089) |
| 33 | Amino acid sequence of a ATP-citrate lyase (EC. 2.3.3.8) (ATP citrate lyase subunit 2) |
| | (locus CT1088) |
| 34 | Amino acid sequence of a citryl-CoA synthetase (large subunit, CcsA) (locus BAD17844) |
| 35 | Amino acid sequence of a citryl-CoA synthetase (small subunit, CcsB) (locus BAD17846) |
| 36 | Amino acid sequence of a citryl-CoA ligase (CcI) (locus BAD17841) |
| 37 | Amino acid sequence of a malate dehydrogenase (EC 1.1.1.37) (locus CAA56810) |
| 38 | Amino acid sequence of a fumarase (also known as fumarate hydratase) (EC 4.2.1.2) |
| | (fumarase hydratase class I) (aerobic isozyme) (FumA) (JW1604) |
| 39 | Amino acid sequence of a fumarase (also known as fumarate hydratase) (EC 4.2.1.2) |
| | (fumarate hydratase class I) (anaerobic isozyme) (FumB) (JW4083) |
| 40 | Amino acid sequence of a fumarase (also known as fumarate hydratase) (EC 4.2.1.2) |
| | (fumarate hydratase class II) (FumC) (JW1603) |
| 41 | Amino acid sequence of a succinate dehydrogenase (EC 1.3.99.1) (SdhA flavoprotein |
| | subunit) (locus NP_415251) |
| 42 | Amino acid sequence of a succinate dehydrogenase (EC 1.3.99.1) (SdhB iron-sulfur |
| | subunit) (locus NP_415252) |
| 43 | Amino acid sequence of a succinate dehydrogenase (EC 1.3.99.1) (SdhC membrane anchor |
| | subunit) (locus NP_415249) |
| 44 | Amino acid sequence of a succinate dehydrogenase (EC 1.3.99.1) (SdhD membrane |
| | anchor subunit) (locus NP_415250) |
| 45 | Amino acid sequence of an acetyl-CoA:succinate CoA transferase (also known as |
| | succinyl-CoA synthetase) (EC 6.2.1.5) (succinyl-CoA synthetase subunit alpha) (SucD) |
| | (locus AAA23900) |
| 46 | Amino acid sequence of a an acetyl-CoA:succinate CoA transferase (also known as |
| | succinyl-CoA synthetase) (EC 6.2.1.5) (succinyl-CoA synthetase subunit alpha) (SucC) |
| | (locus AAA23899) |
| 47 | Amino acid sequence of a 2-oxoketoglutarate synthase (also known as alpha-ketoglutarate |
| | synthase) (EC 1.2.7.3) (KorA) (locus AB046568) |
| 48 | Amino acid sequence of a 2-oxoketoglutarate synthase (also known as alpha-ketoglutarate |
| | synthase) (EC 1.2.7.3) (KorB) (locus AB046568) |
| 49 | Amino acid sequence of a isocitrate dehydrogenase (EC 1.1.1.42) (Idh) (locus EAM42635) |
| 50 | Amino acid sequence of a NAD-dependent isocitrate dehydrogenase (EC 1.1.1.41) |
| | (Subunit 1, Idh1) (locus YNL037C) |
| 51 | Amino acid sequence of a NAD-dependent isocitrate dehydrogenase (EC 1.1.1.41) |
| | (Subunit 2, Idh2) (locus YOR136W) |
| 52 | Amino acid sequence of an aconitate hydrase 1 (AcnA) (locus b1276) |
| 53 | Amino acid sequence of an aconitate hydratase 2 (AcnB) (locus b0118) |
| 54 | Amino acid sequence of a pyruvate synthase (subunit PorA) (locus AA036986) |
| 55 | Amino acid sequence of a pyruvate synthase (subunit PorB) (locus AA036985) |
| 56 | Amino acid sequence of a pyruvate synthase (subunit PorC) (locus AA036988) |
| 57 | Amino acid sequence of a pyruvate synthase (subunit PorD) (locus AA036987) |
| 58 | Amino acid sequence of a phosphoenolpyruvate synthase (PpsA) (locus AAA24319) |
| 59 | Amino acid sequence of a phosphoenolpyruvate carboxylase (PpC) (locus CAA29332) |
| 60 | Amino acid sequence of a NADP-dependent formate dehydrogenase (EC 1.2.1.4.3) (Mt- |
| | FdhA) (locus AAB18330) |
| 61 | Amino acid sequence of a NADP-dependent formate dehydrogenase (EC 1.2.1.4.3) (beta |
| | subunit, Mt-FdhB) (locus AAB18329) |
| 62 | Amino acid sequence of a formate tetrahydrofolate ligase (EC 6.3.4.3) (locus M21507) |
| 63 | Amino acid sequence of a methenyltetrahydrofolate cyclohydrolase (also known as 5,10- |
| | methylene-tetrahydrofolate dehydrogenase) (EC 3.5.4.9 and 1.5.1.5) (locus AAA23803) |
| 64 | Amino acid sequence of a methylene tetrahydrofolate reductase (EC 1.5.1.20) (MetF) |
| | (locus CAA24747) |
| 65 | Amino acid sequence of a 5-methyltetrahydrofolate corrinoid/iron sulfur protein |
| | methyltransferase (AcsE) (locus AAA53548) |
| 66 | Amino acid sequence of a carbon monoxide dehydrogenase (subunit beta) (locus |
| | AAA23228) |
| 67 | Amino acid sequence of an acetyl-CoA synthase (subunit alpha) (locus AAA23229) |
| 68 | Amino acid sequence of a malate synthase (EC 2.3.3.9) (locus JW3974) (AceB) |
| 69 | Amino acid sequence of a malate synthase enzyme (locus JW2943) (malate synthase G) |
| | (GlcB) |
| 70 | Amino acid sequence of an isocitrate lyase (EC 4.1.3.1) (locus JW3975) (AceA) |
| 71 | Amino acid sequence of a malate dehydrogenase (EC 1.1.1.37) (locus JW3205) (Mdh) |
| 72 | Amino acid sequence of a pyruvate carboxylase (EC 6.4.4.1) (locus YGL062W) (Pyc1) |
| 73 | Amino acid sequence of a phosphoenolpyruvate carboxykinase (EC 4.1.1.49) (locus |
| | JW3366) (PckA) |
| 74 | Amino acid sequence of a fructose-1,6-bisphosphatase (EC 3.1.3.11) (locus JW4191) |
| | (Fbp) |
| 75 | Amino acid sequence of a glucose-6-phosphatase (EC 3.1.3.68) (locus YHR044C) (Dog1) |
| 76 | Amino acid sequence of a glucose-6-phosphatase (locus YHR043C) (Dog2) |
| 77 | Amino acid sequence of a pyruvate ferredoxin oxidoreductase (locus Moth_0064) |
| 78 | Amino acid sequence of a NAD⁺-dependent isocitrate dehydrogenase (EC 1.1.1.41) (locus |
| | YNL037C) (Idh1) |
| 79 | Amino acid sequence of a NAD⁺-dependent isocitrate dehydrogenase (EC 1.1.1.41) (locus |
| | YOR136W) (Idh2) |
| 80 | Amino acid sequence of a malate dehydrogenase (EC 1.1.1.37) (locus JW3205) (Mdh) |
| 81 | Amino acid sequence of a nuo operon gene (locus AF029365) (NuoA, accession |
| | AAC24985.1) |
| 82 | Amino acid sequence of a nuo operon gene (locus AF029365) (NuoB, accession |
| | AAC24986.1) |
| 83 | Amino acid sequence of a nuo operon gene (locus AF029365) (NuoC, accession |
| | AAC24987.1) |
| 84 | Amino acid sequence of a nuo operon gene (locus AF029365) (NuoD, accession |
| | AAC24988.1) |
| 85 | Amino acid sequence of a nuo operon gene (locus AF029365) (NuoE, accession |
| | AAC24989.1) |
| 86 | Amino acid sequence of a nuo operon gene (locus AF029365) (NuoF, accession |
| | AAC24991.1) |
| 87 | Amino acid sequence of a nuo operon gene (locus AF029365) (NuoG, accession |
| | AAC24995.1) |
| 88 | Amino acid sequence of a nuo operon gene (locus AF029365) (NuoH, accession |
| | AAC24997.1) |
| 89 | Amino acid sequence of a nuo operon gene (locus AF029365) (NuoI, accession |
| | AAC24999.1) |
| 90 | Amino acid sequence of a nuo operon gene (locus AF029365) (NuoJ, accession |
| | AAC25001.1) |
| 91 | Amino acid sequence of a nuo operon gene (locus AF029365) (NuoK, accession |
| | AAC25002.1) |
| 92 | Amino acid sequence of a nuo operon gene (locus AF029365) (NuoL, accession |
| | AAC25003.1) |
| 93 | Amino acid sequence of a nuo operon gene (locus AF029365) (NuoM, accession |
| | AAC25004.1) |
| 94 | Amino acid sequence of a nuo operon gene (locus AF029365) (NuoN, accession |
| | AAC25005.1) |
| 95 | Amino acid sequence of a glucose-6-phosphate dehydrogenase (EC 1.1.1.49) (Zwf) (locus |
| | JW1841) |
| 96 | Amino acid sequence of a 6-phosphogluconolactonase (EC 3.1.1.31) (Pgi) (locus JW0750) |
| 97 | Amino acid sequence of a 6-phosphogluconate dehydrogenase (EC 1.1.1.44) (Znd) (locus |
| | JW2011) |
| 98 | Amino acid sequence of a isocitrate dehydrogenase (EC 1.1.1.42) (Icd) (locus JW1122) |
| 99 | Amino acid sequence of a malic enzyme (EC 1.1.1.40) (MaeB) (locus JW2447) |
| 100 | Amino acid sequence of a pyridine nucleotide transhydrogenase (EC 1.6.1.1) (SthA or |
| | UdhA) (locus NP_418397.2) |
| 101 | Amino acid sequence of a pyridine nucleotide transhydrogenase (multisubunit of NAD(P) |
| | transhydrogenase subunit alpha) (PntA) (locus JW1595) |
| 102 | Amino acid sequence of a pyridine nucleotide transhydrogenase (NADP transhydrogenase |
| | subunit beta) (PntB) (locus JW1594) |
| 103 | Amino acid sequence of a eukaryotic light-activated proton pump (opsin) (accession |
| | AAG01180) |
| 104 | Amino acid sequence of a beta-carotene ketolase (CrtO) (locus AY705709) |
| 105 | Amino acid sequence of a succinyl-CoA synthetase subunit beta (SucC) (locus |
| | AAM71626) |
| 106 | Amino acid sequence of a succinyl-CoA synthetase, alpha subunit (SucD) (locus |
| | AAM71515) |
| 107 | Amino acid sequence of a 2-oxoglutarate synthase (EC 1.2.7.3) (locus EAM42575) |
| 108 | Amino acid sequence of a 2-oxoglutarate synthase (EC 1.2.7.3) (locus EAM42574) |
| 109 | Amino acid sequence of a 2-oxoglutarate synthase (EC 1.2.7.3) (locus EAM42853) |
| 110 | Amino acid sequence of a 2-oxoglutarate synthase (EC 1.2.7.3) (locus EAM42852) |
| 111 | Amino acid sequence of a isocitrate dehydrogenase (Icd) (EC 1.1.1.42) (locus CAE06681) |
| 112 | Amino acid sequence of a phosphoenolpyruvate synthase (PpsA) (EC 2.7.9.2) (locus |
| | AAC07865) |
| 113 | Amino acid sequence of a formyl-tetrahydrofolate synthetase (EC 6.3.4.3) (locus |
| | AAB49329) |
| 114 | Amino acid sequence of a formate-tetrahydrofolate ligase (EC 6.3.4.3) (locus BA000016) |
| 115 | Amino acid sequence of a methenyltetrahydrofolate cyclohydrolase (FolD) (EC 3.5.4.9) |
| | (locus ABC19825) |
| 116 | Amino acid sequence of a methylenetetrahydrofolate dehydrogenase (FolD) (EC 1.5.1.5 or |
| | 3.5.4.9) (locus AAO36126) |
| 117 | Amino acid sequence of a methylenetetrahydrofolate dehydrogenase (FolD) (EC 3.5.4.9) |
| | (locus BAB81529) |
| 118 | Amino acid sequence of a 5,10 methylenetetrahydrofolate reductase (MetF) (locus |
| | AAC23094) |
| 119 | Amino acid sequence of a 5,10 methylenetetrahydrofolate reductase (MetF) (locus |
| | CAA30531) |
| 120 | Amino acid sequence of a 5-methyltetrahydrofolate corrinoid/iron sulfur protein |
| | methyltransferase (AcsE) (locus ABB15216) |
| 121 | Amino acid sequence of a acetyl-CoA decarbonylase/synthase complex subunit beta |
| | (AcsB) (EC 1.2.99.2) (locus YP_360060) |
| 122 | Amino acid sequence of a beta-carotene ketolase (CrtO) with sequence homology to |
| | phytoene dehydrogenase (locus NP_293819) |
| 123 | Wild type nucleotide sequence for Proteorhodopsin 19p19 |
| 124 | Wild type nucleotide sequence for Proteorhodopsin 25f10 |
| 125 | Wild type nucleotide sequence for Proteorhodopsin BAC46A06 |
| 126 | Wild type nucleotide sequence for Proteorhodopsin BAC17h8 |
| 127 | Wild type nucleotide sequence for Candidatus Pelagibacter ubique HTCC1062 |
| | bacteriorhodopsin |
| 128 | Wild type nucleotide sequence for Salinibacter ruber DSM 13855 bacteriorhodopsin |
| 129 | Wild type nucleotide sequence for GGPP synthase crtE 25f10 |
| 130 | Wild type nucleotide sequence for GGPP synthase crtE 19p19 |
| 131 | Wild type nucleotide sequence for GGPP BAC46A06 |
| 132 | Wild type nucleotide sequence for GGPP BAC17H8 |
| 133 | Wild type nucleotide sequence for Pyrobaculum arsenaticum DSM 13514 Geranylgeranyl |
| | phosphate synthase |
| 134 | Wild type nucleotide sequence for Thermosynechococcus elongatus BP-1 geranylgeranyl |
| | pyrophosphate synthase |
| 135 | Wild type nucleotide sequence for Picrophilus torridus DSM 9790 GGPS |
| 136 | Wild type nucleotide sequence for Phytoene synthase 19p19 |
| 137 | Wild type nucleotide sequence for Phytoene synthase 25f10 |
| 138 | Wild type nucleotide sequence for Phytoene synthase BAC46A06 |
| 139 | Wild type nucleotide sequence for Phytoene syntase BAC17H8 |
| 140 | Wild type nucleotide sequence for Thermosynechococcus elongatus BP-1 Phytoene |
| | synthase |
| 141 | Wild type nucleotide sequence for Picrophilus torridus DSM 9790 Phytoene synthase |
| 142 | Wild type nucleotide sequence for Salinibacter ruber DSM 13855 phytoene synthase |
| 143 | Wild type nucleotide sequence for Phytoene dehydrogenase crtI 19p19 |
| 144 | Wild type nucleotide sequence for Phytoene dehydrogenase crtI 25F10 |
| 145 | Wild type nucleotide sequence for Phytoene dehydrogenase BAC46A06 |
| 146 | Wild type nucleotide sequence for Phytoene dehydrogenase BAC17H8 |
| 147 | Wild type nucleotide sequence for Pyrobaculum arsenaticum DSM 13514 Phytoene |
| | dehydrogenase |
| 148 | Wild type nucleotide sequence for Thermosynechococcus elongatus BP-1 Phytoene |
| | dehydrogenase |
| 149 | Wild type nucleotide sequence for Picrophilus torridus DSM 9790 Phytoene |
| | dehygrogenase |
| 150 | Wild type nucleotide sequence for Salinibacter ruber DSM 13855 Phytoene dehydrogenase |
| 151 | Wild type nucleotide sequence for Lycopene cyclase crtY 19p19 |
| 152 | Wild type nucleotide sequence for Lycopene cyclase crtY 25f10 |
| 153 | Wild type nucleotide sequence for BAC46A06 Lycopene cyclase |
| 154 | Wild type nucleotide sequence for Lycopene cyclase BAC17H8 |
| 155 | Wild type nucleotide sequence for Picrophilus torridus DSM 9790 Lycopene cyclase |
| 156 | Wild type nucleotide sequence for Carotene dehydrogenase blh 19p19 |
| 157 | Wild type nucleotide sequence for Carotene dehydrogenase blh 25f10 |
| 158 | Wild type nucleotide sequence for Carotene dehydrogenase BAC46A06 |
| 159 | Wild type nucleotide sequence for Carotene dehydrogenase BAC17H8 |
| 160 | Wild type nucleotide sequence for Picrophilus torridus DSM 9790 Carotene hydroxylase |
| 161 | Wild type nucleotide sequence for Salinibacter ruber DSM 13855 beta carotene 15 15 |
| | deoxygenase |
| 162 | Wild type nucleotide sequence for IPP delta isomerase 19p19 |
| 163 | Wild type nucleotide sequence for IPP delta isomerase 25f10 |
| 164 | Wild type nucleotide sequence for IPP isomerase BAC46A06 |
| 165 | Wild type nucleotide sequence for IPP delta isomerase BAC17H8 |
| 166 | Wild type nucleotide sequence for Picrophilus torridus DSM 9790 IPP |
| 167 | Wild type nucleotide sequence for IPP Delta Isomerase Pyrobaculum arsenaticum DSM |
| | 13514 |
| 168 | Wild type nucleotide sequence for Salinibacter ruber DSM 13855 IPP |
| 169 | Optimized amino acid sequence for Salinibacter ruber DSM 13855 IPP |
| 170 | Optimized nucleotide sequence for Salinibacter ruber DSM 13855 IPP |
| 171 | Optimized amino acid sequence for IPP Delta Isomerase Pyrobaculum arsenaticum DSM |
| | 13514 |
| 172 | Optimized nucleotide sequence for IPP Delta Isomerase Pyrobaculum arsenaticum DSM |
| | 13514 |
| 173 | Optimized amino acid sequence for Picrophilus torridus DSM 9790 IPP |
| 174 | Optimized nucleotide sequence for Picrophilus torridus DSM 9790 IPP |
| 175 | Optimized amino acid sequence for IPP delta isomerase BAC17H8 |
| 176 | Optimized nucleotide sequence for IPP delta isomerase BAC17H8 |
| 177 | Optimized amino acid sequence for IPP isomerase BAC46A06 |
| 178 | Optimized nucleotide sequence for IPP isomerase BAC46A06 |
| 179 | Optimized amino acid sequence for IPP delta isomerase 25f10 |
| 180 | Optimized nucleotide sequence for IPP delta isomerase 25f10 |
| 181 | Optimized amino acid sequence for IPP delta isomerase 19p19 |
| 182 | Optimized nucleotide sequence for IPP delta isomerase 19p19 |
| 183 | Optimized amino acid sequence for Salinibacter ruber DSM 13855 beta carotene 15 15 |
| | deoxygenase |
| 184 | Optimized nucleotide sequence for Salinibacter ruber DSM 13855 beta carotene 15 15 |
| | deoxygenase |
| 185 | Optimized amino acid sequence for Picrophilus torridus DSM 9790 Carotene hydroxylase |
| 186 | Optimized nucleotide sequence for Picrophilus torridus DSM 9790 Carotene hydroxylase |
| 187 | Optimized amino acid sequence for Carotene dehydrogenase BAC17H8 |
| 188 | Optimized nucleotide sequence for Carotene dehydrogenase BAC17H8 |
| 189 | Optimized amino acid sequence for Carotene dehydrogenase BAC46A06 |
| 190 | Optimized nucleotide sequence for Carotene dehydrogenase BAC46A06 |
| 191 | Optimized amino acid sequence for Carotene dehydrogenase blh 25f10 |
| 192 | Optimized nucleotide sequence for Carotene dehydrogenase blh 25f10 |
| 193 | Optimized amino acid sequence for Carotene dehydrogenase blh 19p19 |
| 194 | Optimized nucleotide sequence for Carotene dehydrogenase blh 19p19 |
| 195 | Optimized amino acid sequence for Picrophilus torridus DSM 9790 Lycopene cyclase |
| 196 | Optimized nucleotide sequence for Picrophilus torridus DSM 9790 Lycopene cyclase |
| 197 | Optimized amino acid sequence for Lycopene cyclase BAC17H8 |
| 198 | Optimized nucleotide sequence for Lycopene cyclase BAC17H8 |
| 199 | Optimized amino acid sequence for BAC46A06 Lycopene cyclase |
| 200 | Optimized nucleotide sequence for BAC46A06 Lycopene cyclase |
| 201 | Optimized amino acid sequence for Lycopene cyclase crtY 25f10 |
| 202 | Optimized nucleotide sequence for Lycopene cyclase crtY 25f10 |
| 203 | Optimized amino acid sequence for Lycopene cyclase crtY 19p19 |
| 204 | Optimized nucleotide sequence for Lycopene cyclase crtY 19p19 |
| 205 | Optimized amino acid sequence for Salinibacter ruber DSM 13855 Phytoene |
| | dehydrogenase |
| 206 | Optimized nucleotide sequence for Salinibacter ruber DSM 13855 Phytoene |
| | dehydrogenase |
| 207 | Optimized amino acid sequence for Picrophilus torridus DSM 9790 Phytoene |
| | dehygrogenase |
| 208 | Optimized nucleotide sequence for Picrophilus torridus DSM 9790 Phytoene |
| | dehygrogenase |
| 209 | Optimized amino acid sequence for Thermosynechococcus elongatus BP-1 Phytoene |
| | dehydrogenase |
| 210 | Optimized nucleotide sequence for Thermosynechococcus elongatus BP-1 Phytoene |
| | dehydrogenase |
| 211 | Optimized amino acid sequence for Pyrobaculum arsenaticum DSM 13514 Phytoene |
| | dehydrogenase |
| 212 | Optimized nucleotide sequence for Pyrobaculum arsenaticum DSM 13514 Phytoene |
| | dehydrogenase |
| 213 | Optimized amino acid sequence for Phytoene dehydrogenase BAC17H8 |
| 214 | Optimized nucleotide sequence for Phytoene dehydrogenase BAC17H8 |
| 215 | Optimized amino acid sequence for Phytoene dehydrogenase BAC46A06 |
| 216 | Optimized nucleotide sequence for Phytoene dehydrogenase BAC46A06 |
| 217 | Optimized amino acid sequence for Phytoene dehydrogenase crtI 25F10 |
| 218 | Optimized nucleotide sequence for Phytoene dehydrogenase crtI 25F10 |
| 219 | Optimized amino acid sequence for Phytoene dehydrogenase crtI 19p19 |
| 220 | Optimized nucleotide sequence for Phytoene dehydrogenase crtI 19p19 |
| 221 | Optimized amino acid sequence for Salinibacter ruber DSM 13855 phytoene synthase |
| 222 | Optimized nucleotide sequence for Salinibacter ruber DSM 13855 phytoene synthase |
| 223 | Optimized amino acid sequence for Picrophilus torridus DSM 9790 Phytoene synthase |
| 224 | Optimized nucleotide sequence for Picrophilus torridus DSM 9790 Phytoene synthase |
| 225 | Optimized amino acid sequence for Thermosynechococcus elongatus BP-1 Phytoene |
| | synthase |
| 226 | Optimized nucleotide sequence for Thermosynechococcus elongatus BP-1 Phytoene |
| | synthase |
| 227 | Optimized amino acid sequence for Phytoene syntase BAC17H8 |
| 228 | Optimized nucleotide sequence for Phytoene syntase BAC17H8 |
| 229 | Optimized amino acid sequence for Phytoene synthase BAC46A06 |
| 230 | Optimized nucleotide sequence for Phytoene synthase BAC46A06 |
| 231 | Optimized amino acid sequence for Phytoene synthase 25f10 |
| 232 | Optimized nucleotide sequence for Phytoene synthase 25f10 |
| 233 | Optimized amino acid sequence for Phytoene synthase 19p19 |
| 234 | Optimized nucleotide sequence for Phytoene synthase 19p19 |
| 235 | Optimized amino acid sequence for Picrophilus torridus DSM 9790 GGPS |
| 236 | Optimized nucleotide sequence for Picrophilus torridus DSM 9790 GGPS |
| 237 | Optimized amino acid sequence for Thermosynechococcus elongatus BP-1 GGPS |
| 238 | Optimized nucleotide sequence for Thermosynechococcus elongatus BP-1 GGPS |
| 239 | Optimized amino acid sequence for Pyrobaculum arsenaticum DSM 13514 GGPS |
| 240 | Optimized nucleotide sequence for Pyrobaculum arsenaticum DSM 13514 GGPS |
| 241 | Optimized amino acid sequence for GGPP BAC17H8 |
| 242 | Optimized nucleotide sequence for GGPP BAC17H8 |
| 243 | Optimized amino acid sequence for GGPP BAC46A06 |
| 244 | Optimized nucleotide sequence for GGPP BAC46A06 |
| 245 | Optimized amino acid sequence for GGPP synthase crtE 19p19 |
| 246 | Optimized nucleotide sequence for GGPP synthase crtE 19p19 |
| 247 | Optimized amino acid sequence for GGPP synthase crtE 25f10 |
| 248 | Optimized nucleotide sequence for GGPP synthase crtE 25f10 |
| 249 | Optimized amino acid sequence for Salinibacter ruber DSM 13855 bacteriorhodopsin |
| 250 | Optimized nucleotide sequence for Salinibacter ruber DSM 13855 bacteriorhodopsin |
| 251 | Optimized amino acid sequence for Candidatus Pelagibacter ubique HTCC1062 |
| | bacteriorhodopsin |
| 252 | Optimized nucleotide sequence for Candidatus Pelagibacter ubique HTCC1062 |
| | bacteriorhodopsin |
| 253 | Optimized amino acid sequence for Proteorhodopsin BAC17h8 |
| 254 | Optimized nucleotide sequence for Proteorhodopsin BAC17h8 |
| 255 | Optimized amino acid sequence for Proteorhodopsin BAC46A06 |
| 256 | Optimized nucleotide sequence for Proteorhodopsin BAC46A06 |
| 257 | Optimized amino acid sequence for Proteorhodopsin 25f10 |
| 258 | Optimized nucleotide sequence for Proteorhodopsin 25f10 |
| 259 | Optimized amino acid sequence for Proteorhodopsin 19p19 |
| 260 | Optimized nucleotide sequence for Proteorhodopsin 19p19 |
| 261 | Optimized amino acid sequence for Salinibacter ruber DSM 13855 fructose-bisphosphate |
| | aldolase |
| 262 | Optimized nucleotide sequence for Salinibacter ruber DSM 13855 fructose-bisphosphate |
| | aldolase |
| 263 | Wild type nucleotide sequence for Salinibacter ruber DSM 13855 fructose-bisphosphate |
| | aldolase |
| 264 | Optimized amino acid sequence for Synechococcus sp. PCC 7002 fructose-bisphosphate |
| | aldolase, class I |
| 265 | Optimized nucleotide sequence for Synechococcus sp. PCC 7002 fructose-bisphosphate |
| | aldolase, class I |
| 266 | Wild type nucleotide sequence for Synechococcus sp. PCC 7002 fructose-bisphosphate |
| | aldolase, class I |
| 267 | Optimized nucleotide sequence for Synechococcus elongatus PCC 7942 sedoheptulose- |
| | 1,7-bisphosphatase |
| 268 | Wild type nucleotide sequence for Synechococcus elongatus PCC 7942 sedoheptulose-1,7- |
| | bisphosphatase |
| 269 | Optimized nucleotide sequence for Thermosynechococcus elongatus BP-1 sedoheptulose- |
| | 1,7-bisphosphatase |
| 270 | Wild type nucleotide sequence for Thermosynechococcus elongatus BP-1 sedoheptulose- |
| | 1,7-bisphosphatase |
| 271 | Optimized nucleotide sequence for phosphoribulokinase gene prkA from Synechococcus |
| | sp. PCC7942 (Genbank: AB035257) |
| 272 | Wild type nucleotide sequence rbcL gene (enzyme ribulose-bisphosphate-carboxylase, EC |
| | 4.1.1.39) from Synechococcus PCC6301 |
| 273 | Wild type amino acid sequence rbcL gene (enzyme ribulose-bisphosphate-carboxylase, EC |
| | 4.1.1.39) from Synechococcus PCC6301 |
| 274 | Optimized nucleotide sequence for the rbcL gene |
| 275 | Wild type nucleotide sequence Synechococcus PCC6301 for the rbcS gene (enzyme |
| | ribulose-bisphosphate-carboxylase, EC 4.1.1.39) |
| 276 | Wild type amino acid sequence Synechococcus PCC6301 for the rbcS gene (enzyme |
| | ribulose-bisphosphate-carboxylase, EC 4.1.1.39) |
| 277 | Optimized nucleotide sequence for the rbcS gene |

[0280] All references to publications, including scientific publications, treatises, pre-grant patent publications, and issued patents are hereby incorporated by reference in their entirety for all purposes. The teachings of the specification are intended to exemplify but not limit the invention, the scope of which is determined by the following claims.

What is claimed is:

1. An engineered cell comprising at least two engineered nucleic acids, wherein at least one engineered nucleic acid is selected from a group consisting of a light capture nucleic acid, a carbon dioxide fixation pathway nucleic acid, a NADH pathway nucleic acid, and a NADPH pathway nucleic acid; and wherein a second engineered nucleic acid is selected from a distinct member of said group.

2. The cell of claim 1, wherein said cell is light dependent or fixes carbon.

3. The cell of claim 1, wherein said cell has engineered phototrophic activity.

4. The cell of claim 1, wherein said cell is synthetophototrophic.

5. The cell of claim 1, wherein said cell fixes carbon and is synthetophototrophic.

6. The cell of claim 1, wherein said cell is photoautotrophic in the presence of light and heterotrophic in the absence of light.

7. The cell of claim 1, wherein said cell is a microorganism selected from the group consisting of Acetobacter aceti, Bacillus subtilis, Clostridium ljungdahlii, Clostridium thermocellum, Escherichia coli, Penicillium chrysogenum, Pichia pastoris, Saccharomyces cerevisiae, Schizosaccharomyces pombe, Pseudomonas fluorescens and Zymomonas mobilis.

8. The cell of claim 7, wherein said cell is an Escherichia coli cell.

9. The cell of claim 1, wherein said at least one engineered nucleic acid is an exogenous nucleic acid.

10. The cell of claim 1, wherein said at least one engineered nucleic acid is a modified endogenous gene.

11. The cell of claim 1, further comprising an additional modified endogenous gene.

12. The cell of claim 1, wherein said engineered nucleic acids are selected from at least three members of the group consisting of a light capture nucleic acid, a carbon dioxide fixation pathway nucleic acid, a NADH pathway nucleic acid, and a NADPH pathway nucleic acid.

13. The cell of claim 1, wherein said cell comprises at least one engineered light capture nucleic acid, at least one engineered carbon dioxide fixation pathway nucleic acid, at least one engineered NADH pathway nucleic acid, and at least one engineered NADPH pathway nucleic acid.

14. The cell of claim 1, wherein said cell comprises at least one engineered light capture nucleic acid and at least one engineered carbon dioxide fixation pathway nucleic acid.

15. The cell of claim 1, wherein at least one engineered nucleic acid is a light capture nucleic acid selected from the group consisting of proteorhodopsin, bacteriorhodopsin, deltarhodopsin, xanthorhodopsin, Leptosphaeria maculans opsin, isopentenyl-diphosphate delta-isomerase, 15,15′-beta-carotene dioxygenase, lycopene cyclase, phytoene synthase, phytoene dehydrogenase, geranylgeranyl pyrophosphate synthetase, beta-carotene ketolase, photosystem P840 reaction center large subunit, pscA, photosystem P840 reaction center iron-sulfur protein, pscB, photosystem P840 reaction center cytochrome c-551, pscC, photosystem P840 reaction center protein, pscD, bacteriochlorophyl a binding protein, Fenna-Mathews-Olson protein, FMO, Photosystem I P700 chlorophyll A apoproptein A1, psaA, Photosystem I P700 chlorophyll A apoproptein A2, psaB, Photosystem I iron-sulfur center subunit VII, psaC, Photosystem I reaction center subunit II, psaD, Photosystem I reaction centre subunit IV PsaE, Photosystem I reaction centre subunit IX PsaJ, Photosystem I reaction centre subunit III precursor (PSI-F), Photosystem I reaction centre subunit XII PsaM, Photosystem I reaction center subunit PsaK, Photosystem I assembly protein, Photosystem I subunit VIII PsaI, Photosystem I reaction centre subunit XI PsaL, Photosystem II protein X PsbX, Photosystem II reaction center D1, Photosystem II manganese-stabilizing protein PsbO, Photosystem II 10 kDa phosphoprotein PsbH, Photosystem II reaction center N protein PsbN, Photosystem II protein PsbI, Photosystem II protein PsbK, Photosystem II stability/assembly factor, Cytochrome b559 alpha subunit PsbE, Cytochrome b559 beta chain PsbF, Photosystem II protein L PsbL, Photosystem II protein J PsbJ, PucC protein, Photosystem II reaction center T PsbT, Photosystem II chlorophyll a-binding protein CP47 homolog, Photosystem II protein M PsbM, Photosystem II protein Psb27, Photosystem II protein Y PsbY, Photosystem II reaction centre W protein, Photosystem TI protein P PsbP, Flavodoxin, IsiB, Photosystem II reaction center D2, Photosystem II chlorophyll a-binding protein CP43 homolog, and a Homolog of PsbF protein.

16. The cell of claim 15, wherein at least one engineered nucleic acid is proteorhodopsin.

17. The cell of claim 15 or 16, wherein said cell generates proton motive force, and wherein said proton motive force promotes the growth of said cell in a light-dependent manner.

18. The cell of claim 17, wherein the growth of said cell is in the presence of salt.

19. The cell of claim 17, wherein said proton motive force is generated by proteorhodopsin.

20. The cell of claim 16, further comprising engineered rbcL nucleic acid, engineered rbcS nucleic acid, and engineered phosphoribulokinase.

21. The cell of claim 1, wherein at least one engineered nucleic acid is a carbon dioxide fixation pathway nucleic acid selected from the group consisting of a functional hydroxyproprionate cycle nucleic acid, a reductive TCA cycle nucleic acid, a reductive acetyl coenzyme A pathway nucleic acid, a reductive pentose phosphate cycle nucleic acid, a glyoxylate shunt pathway nucleic acid, a Calvin cycle nucleic acid and a gluconeogenesis pathway nucleic acid.

22. The cell of claim 21, wherein at least one engineered nucleic acid is a carbon dioxide fixation pathway nucleic acid selected from the group consisting of acetyl-CoA carboxylase (subunit alpha), acetyl-CoA carboxylase (subunit beta), biotin-carboxyl carrier protein (accB), biotin-carboxylase, malonyl-CoA reductase, 3-hydroxypropionyl-CoA synthase, propionyl-CoA carboxylase (subunit alpha), propionyl-CoA carboxylase (subunit beta), methylmalonyl-CoA epimerase, methylmalonyl-CoA mutase, succinyl-CoA:L-malate CoA transferase (subunit alpha), succinyl-CoA:L-malate CoA transferase (subunit beta), fumarate reductase—frdA-flavoprotein subunit, fumarate reductase iron-sulfur subunit-frdb, g15 subunit [fumarate reductase subunit c], g13 subunit [fumarate reductase subunit D], fumarate hydratase—class I aerobic (fumA), L-malyl-CoA lyase, ATP-citrate lyase, subunit 1, ATP-citrate lyase, subunit 2, citryl-CoA synthase (large subunit, citryl-CoA synthase (small subunit), citryl-CoA ligase, malate dehydrogenase, fumarase hydratase (aerobic isozyme, fumA), succinate dehydrogenase (flavoprotein subunit—SdhA), SdhB iron-sulfur subunit, SdhC membrane anchor subunit, SdhD membrane anchor subunit, succinyl-CoA synthetase subunit alpha (sucD), succinyl-CoA synthetase subunit beta (sucC), alpha-ketoglutarate subunit alpha-korA, alpha-ketoglutarate subunit beta-korB, isocitrate dehydrogenase—NADP dependent, isocitrate dehydrogenase—NAD dependent Subunit 1, isocitrate dehydrogenase—NAD depend. Subunit 2, aconitate hydratase 1 (acnA), aconitate hydratase 2 (acnB), pyruvate synthase, subunit A porA, pyruvate synthase, subunit B porB, pyruvate synthase, subunit C porC, pyruvate synthase, subunit D porD, phosphoenolpyruvate synthase—ppsA, PEP carboxylase, ppC, NADP-dependent formate dehydrogenase—subunit A Mt-fdhA, NADP-dependent formate dehydrogenase—subunit B Mt-fdhB, formate tetrahydrofolate ligase, methenyltetrahydrofolate cyclohydrolase, methylene tetrahydrofolate reductase, metF, 5-methyltetrahydrofolate corrinoid/iron sulfur protein methyltransferase, acsE, carbon monoxide dehydrogenase/acetyl-CoA synthase—subunit alpha, carbon monoxide dehydrogenase/acetyl-CoA synthase—subunit beta, malate synthase—aceB, isocitrate lyase—aceA, malate dehydrogenase, pyruvate carboxylase, phosphoenolpyruvate carboxykinase, fructose-1,6-bisphosphatase, glucose-6-phosphatase—dog1, pyruvate ferredoxin:oxidoreductase with pyruvate synthase activity, fructose-1,6-bisphosphatase (FBPase) and sedoheptulose-1,7-bisphosphatase (SBPase), bifunctional, cbbF, glyceraldehyde-3-phosphate dehydrogenase (GAPDH), cbbG, phosphoribulokinase (PRK), cbbP, CP12, transketolase, cbbT, fructose 1,6-bisphosphate aldolase, cbbA, pentose-5-phosphate-3-epimerase, cbbE, ribose 5-phosphate isomerase, phosphoglycerate kinase, triosephosphate isomerase, tpiA, Ribulose-1,5-bisphosphate carbyxlase/oxygenase (RubisCo)-small subunit—cbbS, Ribulose-1,5-bisphosphate carbyxlase/oxygenase (RubisCo)-large subunit cbbL, Rubisco activase, rbcL, rbcS, Salinibacter fructose-bisphosphate aldolase, Synechococcus sp. 7002 fructose-bisphosphate aldolase (class I), Synechococcus elongatus PCC 7942 sedoheptulose-1,7-bisphosphatase, and T. elongatus BP-1 sedoheptulose-1,7-bisphosphatase.

23. The cell of claim 22 wherein at least one engineered nucleic acid is a codon-optimized carbon dioxide fixation pathway nucleic acid selected from the group consisting of Salinibacter fructose-bisphosphate aldolase, Synechococcus sp. 7002 fructose-bisphosphate aldolase (class I), Synechococcus elongatus PCC 7942 sedoheptulose-1,7-bisphosphatase, and T. elongatus BP-1 sedoheptulose-1,7-bisphosphatase.

24. The cell of claim 22 or 23, wherein said cell generates proton motive force, and wherein said proton motive force promotes the growth of said cell in a light-dependent manner.

25. The cell of claim 24, wherein said growth is in the presence of salt.

26. The cell of claim 24, wherein said proton motive force is generated by proteorhodopsin.

27. The cell of claim 26, wherein said cell comprises engineered rbcL nucleic acid, engineered rbcS nucleic acid, and engineered phosphoribulokinase.

28. The cell of claim 22, wherein said carbon dioxide fixation pathway nucleic acid is a Woods-Ljungdahl pathway nucleic acid.

29. The cell of claim 27, further comprising an engineered glyoxylate shunt pathway nucleic acid and an exogenous gluconeogenesis pathway nucleic acid.

30. The cell of claim 1, wherein at least one engineered nucleic acid is a NADH pathway nucleic acid selected from the group consisting of soluble pyridine nucleotide transhydrogenase—udhA, membrane-bound pyridine nucleotide transhydrogenase—pntAB, NAD+-dependent isocitrate dehydrogenase—idh, NAD+-dependent isocitrate dehydrogenase—idh2, malate dehydrogenase, and NADH:ubiquinone oxidoreductase—OPERON (a-n).

31. The cell of claim 1, wherein at least one engineered nucleic acid is an endogenous NADH pathway nucleic acid selected from the group consisting of a nuo gene, a ndh gene, cytochrome bo, and cytochrome bd.

32. The cell of claim 31, wherein said endogenous NADH pathway nucleic acid comprises a deletion or modification that disrupts said pathway.

33. The cell of claim 30, comprising at least two engineered NADH pathway nucleic acids, wherein said at least two engineered NADH pathway nucleic acids include a soluble pyridine nucleotide dehydrogenase and a NAD⁺-dependent iso citrate dehydrogenase.

34. The cell of claim 1, wherein at least one engineered nucleic acid is a NADPH pathway nucleic acid selected from the group consisting of glucose-6-phosphate dehydrogenase, zwf, 6-phosphogluconolactonase -pgi, 6-phosphogluconate dehydrogenase, gnd, NADP-dependent isocitrate dehydrogenase, NADP-dependent malic enzyme, soluble pyridine nucleotide transhydrogenase—udhA, or membrane-bound pyridine nucleotide transhydrogenase, subunit alpha, pntA and subunit beta, pntB.

35. The cell of claim 34, comprising at least two engineered NADPH pathway nucleic acids, wherein said at least two NADPH pathway nucleic acids include a soluble nucleotide dehydrogenase and a glucose-6-phosphate dehydrogenase.

36. The cell of claim 1, wherein one or more acetyl-CoA flux nucleic acids are expressed or inhibited.

37. A host cell generating proton motive force, wherein said proton motive force promotes the light-dependent growth of said cell.

38. The host cell of claim 37, wherein the growth of said cell is in the presence of salt.

39. The cell of claim 38, wherein said salt concentration is about 0.3M.

40. A host cell, wherein said host cell is engineered to capture light and fix carbon dioxide.

41. A method for producing carbon products, wherein said products comprise biological sugars, hydrocarbon products, solid forms of carbon, fuels, biofuels or pharmaceutical agents, comprising culturing the cell of any of claims 1, 37 or 40 under conditions sufficient to promote the generation of said carbon products; and collecting or separating the carbon product produced by said cell.

42. The method of claim 41, wherein said cell is cultivated in a bioreactor supplied with a concentrated carbon dioxide source.

43. The method of claim 42, wherein said concentrated carbon dioxide source is offgas from one or more sources selected from the group consisting of a coal plant, refinery, cement production facility, brewery, or natural gas facility.

The application's sequence listing, which the Patent Office published only in electronic form, follows.

SEQUENCE LISTING (277 sequences)

SEQ ID NO: 1 - protein, 257 aa, Unknown
  source: /note="Description of Unknown Sequence: Uncultured marine bacterium"
MSIIKSLKSVAIASLAILIPSIALAAGGNLEPNDPVGITFWLISIAMVAATVFFLMESLRVDGKWRTSMIVGGLVTLVAAVHYFYMRDVWVATGASPTVFRYVDWLITVPLQMIEFYLILAACTAIAVGVFWRLMIGTMVMLIGGYLGEAGFINATVGFVIGMAGWGYILYEIFAGEAGKVAAEGAPPSVQSAFNTMRLIVTIGWAIYPLGYFFGYMTGGVDANSLNLIYNVADVVNKIGFCLAIWAAATSQSEAAK

SEQ ID NO: 2 - protein, 262 aa, Halobacterium sp.
MLELLPTAVEGVSQAQITGRPEWIWLALGTALMGLGTLYFLVKGMGVSDPDAKKFYAITTLVPAIAFTMYLSMLLGYGLTMVPFGGEQNPIYWARYADWLFTTPLLLLDLALLVDADQGTILALVGADGIMIGTGLVGALTKVYSYRFVWWAISTAAMLYILYVLFFGFTSKAESMRPEVASTFKVLRNVTVVLWSAYPVVWLIGSEGAGIVPLNIETLLFMVLDVSAKVGFGLILLRSRAIFGEAEAPEPSAGDGAAATSD

SEQ ID NO: 3 - protein, 250 aa, Haloterrigena sp.
MCCAALAPPMAATVGPESIWLWIGTIGMTLGTLYFVGRGRGVRDRKMQEFYIITIFITTIAAAMYFAMATGFGVTEVMVGDEALTIYWARYADWLFTTPLLLLDLSLLAGANRNTIATLIGLDVFMIGTGAIAALSSTPGTRIAWWAISTGALLALLYVLVGTLSENARNRAPEVASLFGRLRNLVIALWFLYPVVWILGTEGTFGILPLYWETAAFMVLDLSAKVGFGVILLQSRSVLERVATPTAAPT

SEQ ID NO: 4 - protein, 273 aa, Salinibacter ruber
MLQELPTLTPGQYSLVFNMFSFTVATMTASFVFFVLARNNVAPKYRISMMVSALVVFIAGYHYFRITSSWEAAYALQNGMYQPTGELFNDAYRYVDWLLTVPLLTVELVLVMGLPKNERGPLAAKLGFLAALMIVLGYPGEVSENAALFGTRGLWGFLSTIPFVWILYILFTQLGDTIQRQSSRVSTLLGNARLLLLATWGFYPIAYMIPMAFPEAFPSNTPGTIVALQVGYTIADVLAKAGYGVLIYNIAKAKSEEEGFNVSEMVEPATASA

SEQ ID NO: 5 - protein, 339 aa, Unknown
  source: /note="Description of Unknown Sequence: Uncultured marine bacterium"
MTRTSTPLTTDRKNAHLDLAKTSQPLADHPLDAVSLPYCALPECDLNRVSLTTEFLGIELDSPLIITGMTGGTDRAMAINRVLADTAQKKKVALGLGSQRASLESGQSQAELRRLAPDAVLIGNLGGAQLAGKDGLKLARAAVEDIRADALAIHLNPLQEAIQPEGDHDWRGVLSAIETAVGTLNCPVLVKEVGAGLSGNVVRRLAAIGVRHVDVAARGGTNWAQIELNRRPETDRAHYAPFLSCGLMLPDAIAQARAVSNHLCIIASGGVRHGLDAAKCLWLGADLVGMAGHILRTVEDNAGHLHPKQLSDLLYTVQQQLRLSLFLAGKSSIKAFKRE

SEQ ID NO: 6 - protein, 286 aa, Unknown
  source: /note="Description of Unknown Sequence: Uncultured marine bacterium"
MIDILSVTDLFALAAVMLIGLPHGAFDGALAFCLGFGRSPGKIIGFLVMYLLLAGLSALIWLVSPVFALAGFLVLTIVHFGSGDTEHLFQPGPRVVQRSLKACQILVHGGMVTILLPVFHTTEVSQLFIVLAGPNAVLIIDALRPALKIWLAAACIYASAALFKRQYAAAAGELAGLAVLVWLLPPLAGFAVYFCIVHSRRHFTSIWKAMQLFVSRRFILISGGILTAASWAMGAGLYFSQTMSGSFSPDEAFIRTVFILLAALTVPHMLLVDTMYRPTLKKITQP

SEQ ID NO: 7 - protein, 376 aa, Unknown
  source: /note="Description of Unknown Sequence: Uncultured marine bacterium"
MIRTASLEQTELAIIGAGCAGLSLARQLVRTEKTSIIKACLYGPVSPAATNRHSWGFWATQGLKEQTELSRQRWHKWQIITAERKVTQTADSHPYCRLDSRDWLTHCLNIIDGNIQQKPDNLPTPGAQPVFDSRPPNVPEGALLQHFKGVEIKAAQPCFSPDTAILMDFRCDQSRGIHFIYLLPYSPTEALVESTMLSPKRQNDDFYAEAIKTYLETYWATGGWQVKHTEQGCIPMAFVQPVNLDYLPIGANGGCVRPSSGYAFAFIQKHTDAIIDRLVLSGTDPLTPATMPRPISRFDLFLDRIFLHVIRHHPEKAAELFAQIALALNGDEFARFMSGLADFKIYAKLITAMPAGLFLHALWNIHVTNRDNADKK

SEQ ID NO: 8 - protein, 327 aa, Unknown
  source: /note="Description of Unknown Sequence: Uncultured marine bacterium"
MSSPRAEQKQQDAHYPAERGTALKTLAKNGKSFYWASRLLGRQMAIDAAELYSLCRLLDDIADGDINGLDTKEGTHRLRHIRRQLTQIDAGKIPEQPDPALLQYMQVMNRCQIPVMPLIHLLDGLLLDQSAMLLKDEADLVAYAYHVAGAVGLLMCPVLGCDDRTAFRFAVDMGIGMQLTNIARDILEDAQMGRRYLPESWTGQLSPDQIVACAEAPESQNYKQIQAAADRLLTLADQYYESGRLGLGFLPVRARYCIAVAAGVYRAIGTKLRTRKLRWGDGRVVTSKSEKLSASLQALSKLYRLPKATHNTNLHAPLTSLLDEALK

SEQ ID NO: 9 - protein, 515 aa, Unknown
  source: /note="Description of Unknown Sequence: Uncultured marine bacterium"
MDDARPYSYKKDMVERVHSVVVGSGFGGIAAALRMRAKGHQVTLIERLEDVGGRARVFERGGFRHDAGPTVITAPFLFDELFDLFGETRSEHLKFVPLDPWYRFHFHDGSEFDYRPSLADTHAEIARFSPEDTKNYDRLVNTSKQIFDVGFTQLADKPFTRFTSMIKLIPQLLRLRSYLTVAQLVNSHIKHPLLRQAFSIHPLLVGGNPFDTTSIYALIHYLERKWGVYFCMGGTGKLVAELKALMIRQGVDLKLNTDIIEICVSDKKVTGVRTADGAFISADNVICNADPPTVYRQMLPSQTHLRKKVLPEAVTRYSMGLFVLFFGTQQRYPDIAHHTIWMGKRYKDLLHDIFSKKILAEDFSLYLHRPTATDARFAPEGCDSFYVLCPVPNLQGDVDWAKQGPLLQDRIVTALEKSIMPDLRNVITEDFYMTPEDFKADYRSEHGAGFSISPSFTQSAWFRYHNRDPHLANLYFSGAGAHPGAGMPGVLCSAKVVETLVSEDERKAAHVQPTR

SEQ ID NO: 10 - protein, 338 aa, Unknown
  source: /note="Description of Unknown Sequence: Uncultured marine bacterium"
MTENIASQVNEMQGAEKLDALPDLSAVLSAFIVRRLPSGKHPLATAAQHHFKRTGKQLRGRMALAAGDSFGVPRTASLPWAAAVEVLHNASLVHDDICDGDMVRRGAPSVWAFYGRDTALALGDWLIALSFELAAEAAYLGQTPQLVSILSRHMAATTAGQALEFEVRAYPDWSGYMDISTGKTAPLFIASVEGIAHLAGRRDAIRPLNRFFSAAGGCYQIANDMLNVIGKDGAESPASDLLRRAPNAVIVMFQTTLDKHTATAFDKWLSSGDTHGALTWQEHVRRSPALTMTSSALLSMLEEAEASSAAFPTDCRAIITPILAQLRHVCRDLTSLNA

SEQ ID NO: 11 - protein, 510 aa, Salinibacter ruber
MSTDYDLITIGAGHNGLIASAYVAQAGYRVAVFEEREMVGGAVSTKELFPGYQIDLGGSAHILIRQTPIVEELELEQYGLTYIELDPMFVAPFPDGDVIYFYRDLDRTVDHLERLFPGEGKAYREFVTDWIGFARTMRDIFLTSPSPLELGKQLIRGASSPLPWQEELRHILRPYQEVLGSYFEEEKLRTAIAWMAAQSGPPPTDPLTGPFALWHPLYHEGGVARPKGGSGELTQALKRHIEAHGGDIYTDAPVENILVNHEHAEGIRVNGTSYTSRAVCSATHAKETFDHLLPARHRPDGADGLRIGNGFGAMMRLALDEPVSYTATADDQKARTGLQLLCRDMTQLRAAYGDHLAGRPAQDPPLIAMTFSAADDTLAPPGGEVLWLWGQYFPYELASGRTWPDIAEEVADTLLAQFEQYAPGTRQSIVGQLFQHPEWLEEHLGLYRGNVMHLEMSIDQMFSARPLFGASDYEGPVDDLFLTGASTHPGGGIMGASGRNAARVVLKNVA

SEQ ID NO: 12 - protein, 319 aa, Escherichia coli
MSLNFLDFEQPIAELEAKIDSLTAVSRQDEKLDINIDEEVHRLREKSVELTRKIFADLGAWQIAQLARHPQRPYTLDYVRLAFDEFDELAGDRAYADDKAIVGGIARLDGRPVMIIGHQKGRETKEKIRRNFGMPAPEGYRKALRLMQMAERFKMPIITFIDTPGAYPGVGAEERGQSEAIARNLREMSRLGVPVVCTVIGEGGSGGALAIGVGDKVNMLQYSTYSVISPEGCASILWKSADKAPLAAEAMGIIAPRLKELKLIDSIIPEPLGGAHRNPEAMAASLKAQLLADLADLDVLSTEDLKNRRYQRLMSYGYA

SEQ ID NO: 13 - protein, 304 aa, Escherichia coli
MSWIERIKSNITPTRKASIPEGVWTKCDSCGQVLYRAELERNLEVCPKCDHHMRMTARNRLHSLLDEGSLVELGSELEPKDVLKFRDSKKYKDRLASAQKETGEKDALVVMKGTLYGMPVVAAAFEFAFMGGSMGSVVGARFVRAVEQALEDNCPLICFSASGGARMQEALMSLMQMAKTSAALAKMQERGLPYISVLTDPTMGGVSASFAMLGDLNIAEPKALIGFAGPRVIEQTVREKLPPGFQRSEFLIEKGAIDMIVRRPEMRLKLASILAKLMNLPAPNPEAPREGVVVPPVPDQEPEA

SEQ ID NO: 14 - protein, 156 aa, Escherichia coli
MDIRKIKKLIELVEESGISELEISEGEESVRISRAAPAASFPVMQQAYAAPMMQQPAQSNAAAPATVPSMEAPAAAEISGHIVRSPMVGTFYRTPSPDAKAFIEVGQKVNVGDTLCIVEAMKMMNQIEADKSGTVKAILVESGQPVEFDEPLVVIE

SEQ ID NO: 15 - protein, 449 aa, Escherichia coli
MLDKIVIANRGEIALRILRACKELGIKTVAVHSSADRDLKHVLLADETVCIGPAPSVKSYLNIPAIISAAEITGAVAIHPGYGFLSENANFAEQVERSGFIFIGPKAETIRLMGDKVSAIAAMKKAGVPCVPGSDGPLGDDMDKNRAIAKRIGYPVIIKASGGGGGRGMRVVRGDAELAQSISMTRAEAKAAFSNDMVYMEKYLENPRHVEIQVLADGQGNAIYLAERDCSMQRRHQKVVEEAPAPGITPELRRYIGERCAKACVDIGYRGAGTFEFLFENGEFYFIEMNTRIQVEHPVTEMITGVDLIKEQLRIAAGQPLSIKQEEVHVRGHAVECRINAEDPNTFLPSPGKITRFHAPGGFGVRWESHIYAGYTVPPYYDSMIGKLICYGENRDVAIARMKNALQELIIDGIKTNVDLQIRIMNDENFQHGGTNIHYLEKKLGLQEK

SEQ ID NO: 16 - protein, 1220 aa, Chloroflexus aurantiacus
MSGTGRLAGKIALITGGAGNIGSELTRRFLAEGATVIISGRNRAKLTALAERMQAEAGVPAKRIDLEVMDGSDPVAVRAGIEAIVARHGQIDILVNNAGSAGAQRRLAEIPLTEAELGPGAEETLHASIANLLGMGWHLMRIAAPHMPVGSAVINVSTIFSRAEYYGRIPYVTPKAALNALSQLAARELGARGIRVNTIFPGPIESDRIRTVFQRMDQLKGRPEGDTAHHFLNTMRLCRANDQGALERRFPSVGDVADAAVFLASAESAALSGETIEVTHGMELPACSETSLLARTDLRTIDASGRTTLICAGDQIEEVMALTGMLRTCGSEVIIGFRSAAALAQFEQAVNESRRLAGADFTPPIALPLDPRDPATIDAVFDWGAGENTGGIHAAVILPATSHEPAPCVIEVDDERVLNFLADEITGTIVIASRLARYWQSQRLTPGARARGPRVIFLSNGADQNGNVYGRIQSAAIGQLIRVWRHEAELDYQRASAAGDHVLPPVWANQIVRFANRSLEGLEFACAWTAQLLHSQRHINEITLNIPANISATTGARSASVGWAESLIGLHLGKVALITGGSAGIGGQIGRLLALSGARVMLAARDRHKLEQMQAMIQSELAEVGYTDVEDRVHIAPGCDVSSEAQLADLVERTLSAFGTVDYLINNAGIAGVEEMVIDMPVEGWRHTLFANLISNYSLMRKLAPLMKKQGSGYILNVSSYFGGEKDAAIPYPNRADYAVSKAGQRAMAEVFARFLGPEIQINAIAPGPVEGDRLRGTGERPGLFARRARLILENKRLNELHAALIAAARTDERSMHELVELLLPNDVAALEQNPAAPTALRELARRFRSEGDPAASSSSALLNRSIAAKLLARLHNGGYVLPADIFANLPNPPDPFFTRAQIDREARKVRDGIMGMLYLQRMPTEFDVAMATVYYLADRNVSGETFHPSGGLRYERTPTGGELFGLPSPERLAELVGSTVYLIGEHLTEHLNLLARAYLERYGARQVVMIVETETGAETMRRLLHDHVEAGRLMTIVAGDQIEAAIDQAITRYGRPGPVVCTPFRPLPTVPLVGRKDSDWSTVLSEAEFAELCEHQLTHHFRVARKIALSDGASLALVTPETTATSTTEQFALANFIKTTLHAFTATIGVESERTAQRILINQVDLTRRARAEEPRDPHERQQELERFIEAVLLVTAPLPPEADTRYAGRIHRGRAITV

SEQ ID NO: 17 - protein, 1822 aa, Chloroflexus aurantiacus
MIDTAPLAPPRAPRSNPIRDRVDWEAQRAAALADPGAFHGAIARTVIHWYDPQHHCWIRFNESSQRWEGLDAATGAPVTVDYPADYQPWQQAFDDSEAPFYRWFSGGLTNACFNEVDRHVTMGYGDEVAYYFEGDRWDNSLNNGRGGPVVQETITRRRLLVEVVKAAQVLRDLGLKKGDRIALNMPNIMPQIYYTEAAKRLGILYTPVFGGFSDKTLSDRIHNAGARVVITSDGAYRNAQVVPYKEAYTDQALDKYIPVETAQAIVAQTLATLPLTESQRQTIITEVEAALAGEITVERSDVMRGVGSALAKLRDLDASVQAKVRTVLAQALVESPPRVEAVVVVRHTGQEILWNEGRDRWSHDLLDAALAKILANARAAGFDVHSENDLLNLPDDQLIRALYASIPCEPVDAEYPMFIIYTSGSTGKPKGVIHVHGGYVAGVVHTLRVSFDAEPGDTIYVIADPGWITGQSYMLTATMAGRLTGVIAEGSPLFPSAGRYASIIERYGVQIFKAGVTFLKTVMSNPQNVEDVRLYDMHSLRVATFCAEPVSPAVQQFGMQIMTPQYINSYWATEHGGIVWTHFYGNQDFPLRPDAHTYPLPWVMGDVWVAETDESGTTRYRVADFDEKGEIVITAPYPYLTRTLWGDVPGFEAYLRGEIPLRAWKGDAERFVKTYWRRGPNGEWGYIQGDFAIKYPDGSFTLHGRSDDVINVSGHRMGTEEIEGAILRDRQITPDSPVGNCIVVGAPHREKGLTPVAFIQPAPGRHLTGADRRRLDELVRTEKGAVSVPEDYIEVSAFPETRSGKYMRRFLRNMMLDEPLGDTTTLRNPEVLEEIAAKIAEWKRRQRMAEEQQIIERYRYFRIEYHPPTASAGKLAVVTVTNPPVNALNERALDELNTIVDHLARRQDVAAIVFTGQGARSFVAGADIRQLLEEIHTVEEAMALPNNAHLAFRKIERMNKPCIAAINGVALGGGLEFAMACHYRVADVYAEFGQPEINLRLLPGYGGTQRLPRLLYKRNNGTGLLRALEMILGGRSVPADEALELGLIDAIATGDQDSLSLACALARAAIGADGQLIESAAVTQAFRHRHEQLDEWRKPDPRFADDELRSIIAHPRIERIIRQAHTVGRDAAVHRALDAIRYGIIHGFEAGLEHEAKLFAEAVVDPNGGKRGIREFLDRQSAPLPTRRPLITPEQEQLLRDQKELLPVGSPFFPGVDRIPKWQYAQAVIRDPDTGAAAHGDPIVAEKQIIVPVERPRANQALIYVLASEVNFNDIWAITGIPVSRFDEHDRDWHVTGSGGIGLIVALGEEARREGRLKVGDLVAIYSGQSDLLSPLMGLDPMAADFVIQGNDTPDGSHQQFMLAQAPQCLPIPTDMSIEAAGSYILNLGTIYRALFTTLQIKAGRTIFIEGAATGTGLDAARSAARNGLRVIGMVSSSSRASTLLAAGAHGAINRKDPEVADCFTRVPEDPSAWAAWEAAGQPLLAMFRAQNDGRLADYVVSHAGETAFPRSFQLLGEPRDGHIPTLTFYGATSGYHFTFLGKPGSASPTEMLRRANLRAGEAVLIYYGVGSDDLVDTGGLEAIEAARQMGARIVVVTVSDAQREFVLSLGFGAALRGVVSLAELKRRFGDEFEWPRTMPPLPNARQDPQGLKEAVRRFNDLVFKPLGSAVGVFLRSADNPRGYPDLIIERAAHDALAVSAMLIKPFTGRIVYFEDIGGRRYSFFAPQIWVRQRRIYMPTAQIFGTHLSNAYEILRLNDEISAGLLTITEPAVVPWDELPEAHQAMWENRHTAATYVVNHALPRLGLKNRDELYEAWTAGER

SEQ ID NO: 18 - protein, 681 aa, Roseobacter denitrificans
MFNKILIANRGEIACRVIKTARKMGITTVAIYSDADRQALHVQMADEAVHIGPPPANQSYIVIDKVMEAIKSSGAQAVHPGYGFLSENAKFAQALEAAGVAFVGPPVGAIEKMGDKITSKKIAKEAGVSTVPGYMGLIEDAEDAVKISNEVGYPVMIKASAGGGGKGMRIAWNDDEAREGFQSSKNEAANSFGDDRIFIEKFVTQPRHIEIQVLCDTHGNGIYLGERECSIQRRNQKVVEEAPSPFLDEATRKAMGEQAVALAQAVGYASAGTVEFIVDGDKNFYFLEMNTRLQVEHPVTELITGVDLVEQMIRVANGEKLSITQDDVTLTGWAIENRLYAEDPYRGFLPSIGRLTRYRPPAEVAAGPLLEQKTWQGDAPAGDMAVRNDTGVYEGGEISMYYDPMIAKLCTWAPTRAEAIEKMRVALDSFEVEGIGHNLPFLSAVMDHPKFVSGDMTTAFIAEEYPDGFEGVDLPEAELRRIAAACAAMHRVAEIRRARVSGRMDNHERKVGSDWNAHLQGHSFDLKIDADQDGATVLFEDAARLRVSGSWTPGDQLAEMTVADAPLILKVGKVSGGFRIRTRGADLKVHIRTPRQAELARKMPEKLPPDTSKMLLCPMPGLMVKLDVAVGDEVQEGQALCTIEAMKMENILRAERKGVVTKVNADAGDSLAVDDVIMEFE

SEQ ID NO: 19 - protein, 510 aa, Roseobacter denitrificans
MKDILEQLEDRRAAARLGGGQKRIDAQHGRGKLTARERVDLLLDEGSFEEFDMFVTHRCTDFNMQDQKPAGDGVVTGWGTINGRVVYVFSQDFTVLGGSVSETHSKKICKIMDMAMQNGAPVIGINDSGGARIQEGVDSLAGYGEVFQRNIMASGVVPQISMIMGPCAGGAVYSPAMTDFIFMVKDSSYMFVTGPDVVKTVTNEQVSAEELGGATTHTRKSSVADAAFENDVEALAEVRRLVDFLPLNNREKPPVRPFFDDPDRIEPSLDTLVPDNPNTPYDMKELIHKLADEGDFYEIQEEFAKNIITGFIRLEGRTVGVVANQPLVLAGCLDIDSSRKAARFVRFCDAFEIPLLTLIDVPGFLPGTSQEYGGVIKHGAKLLYAYGEATVPMVTVITRKAYGGAYVVMSSKHLRADFNYAWPTAEVAVMGAKGATEIIHRGDLGDPEKIAQHTADYEERFANPFVASERGFVDEVIQPRSTRKRVARAFASLRNKSVQMPWKKHDNIPL

SEQ ID NO: 20 - protein, 134 aa, Roseobacter denitrificans
MIGRLNHVAIAVPDLEAAAAQYRNTLGAEVGAPQDEPDHGVTVVFITLPNTKIELLYPLGETSPINGFLEKNPAGGIHHICYEVEDIIAARDRLKASGARVLGSGEPKIGAHGKPVLFLHPKDFNGCLVELEQV

SEQ ID NO: 21 - protein, 714 aa, Escherichia coli
MSNVQEWQQLANKELSRREKTVDSLVHQTAEGIAIKPLYTEADLDNLEVTGTLPGLPPYVRGPRATMYTAQPWTIRQYAGFSTAKESNAFYRRNLAAGQKGLSVAFDLATHRGYDSDNPRVAGDVGKAGVAIDTVEDMKVLFDQIPLDKMSVSMTMNGAVLPVLAFYIVAAEEQGVTPDKLTGTIQNDILKEYLCRNTYIYPPKPSMRIIADIIAWCSGNMPRFNTISISGYHMGEAGANCVQQVAFTLADGIEYIKAAISAGLKIDDFAPRLSFFFGIGMDLFMNVAMLRAARYLWSEAVSGFGAQDPKSLALRTHCQTSGWSLTEQDPYNNVIRTTIEALAATLGGTQSLHTNAFDEALGLPTDFSARIARNTQIIIQEESELCRTVDPLAGSYYIESLTDQIVKQARAIIQQIDEAGGMAKAIEAGLPKRMIEEASAREQSLIDQGKRVIVGVNKYKLDHEDETDVLEIDNVMVRNEQIASLERIRATRDDAAVTAALNALTHAAQHNENLLAAAVNAARVRATLGEISDALEVAFDRYLVPSQCVTGVIAQSYHQSEKSASEFDAIVAQTEQFLADNGRRPRILIAKMGQDGHDRGAKVIASAYSDLGFDVDLSPMFSTPEEIARLAVENDVHVVGASSLAAGHKTLIPELVEALKKWGREDICVVAGGVIPPQDYAFLQERGVAAIYGPGTPMLDSVRDVLNLISQHHD

SEQ ID NO: 22 - protein, 428 aa, Chloroflexus aurantiacus
MPPTGEEPSGHAESKPPASDPMSTPGTGQEQLPLSGIRVIDVGNFLAGPYAASILGEFGAEVLKIEHPLGGDPMRRFGTATARHDATLAWLSEARNRKSVTIDLRQQEGVALFLKLVAKSDILIENFRPGTMEEWGLSWPVLQATNPGLIMLRVSGYGQTGPYRRRSGFAHIAHAFSGLSYLAGFPGETPVLPGTAPLGDYIASLFGAIGILIALRHKEQTGRGQLIDVGIYEAVFRILDEIAPAYGLFGKIREREGAGSFIAVPHGHFRSKDGKWVAIACTTDKMFERLAEAMERPELASPELYGDQRKRLAARDIVNQITIEWVGSLTRDEVMRRCLEKEVPVGPLNSIADMFNDEHFLARGNFACIEAEGIGEVVVPNVIPRLSETPGRVTNLGPPLGNATYEVLRELLDISAEEIKRLRSRKII

SEQ ID NO: 23 - protein, 405 aa, Chloroflexus aurantiacus
MDGTTTTLPLAGIRVIDAATVIAAPFCATLLGEFGADVLKVEHPIGGDALRRFGTPTARGDTLTWLSESRNKRSVTLNLQHPEGARVFKELIAHSDVLCENFRPGTLEKWGLGWDVLSKINPRLIMLRVTGYGQTGPYRDRPGFARIAHAVGGIAYLAGMPKGTPVTPGSTTLADYMTGLYGCIGVLLALRHREQTGRGQYIDAALYESVFRCSDELVPAYGMYRKVRERHGSHYNEFACPHGHFQTKDGKWVAISCATDKLFARLANAMGRPELASSSVYGDQKVRLAHASDVNEIVRDWCSSLTRAEVLERCYATATPAAPLNDIADFFGDRHVHARRNLVAIDAEDLGETLIMPNVVPKLSETPGSIRSLGPKLGEHTEEVLKEILGMCDEQINDLRSKRVI

SEQ ID NO: 24 - protein, 602 aa, Escherichia coli
MQTFQADLAIVGAGGAGLRAAIAAAQANPNAKIALISKVYPMRSHTVAAEGGSAAVAQDHDSFEYHFHDTVAGGDWLCEQDVVDYFVHHCPTEMTQLELWGCPWSRRPDGSVNVRRFGGMKIERTWFAADKTGFHMLHTLFQTSLQFPQIQRFDEHFVLDILVDDGHVRGLVAMNMMEGTLVQIRANAVVMATGGAGRVYRYNTNGGIVTGDGMGMALSHGVPLRDMEFVQYHPTGLPGSGILMTEGCRGEGGILVNKNGYRYLQDYGMGPETPLGEPKNKYMELGPRDKVSQAFWHEWRKGNTISTPRGDVVYLDLRHLGEKKLHERLPFICELAKAYVGVDPVKEPIPVRPTAHYTMGGIETDQNCETRIKGLFAVGECSSVGPHGANRLGSNSLAELVVFGRLAGEQATERAATAGNGNEAAIEAQAAGVEQRLKDLVNQDGGENWAKIRDEMGLAMEEGCGIYRTPELMQKTIDKLAELQERFKRVRITDTSSVFNTDLLYTIELGHGLNVAECMAHSAMARKESRGAHQRLDEGCTERDDVNFLKHTLAFRDADGTTRLEYSDVKITTLPPAKRVYGGEADAADKAEAANKKEKANG

SEQ ID NO: 25 - protein, 244 aa, Escherichia coli
MAEMKNLKIEVVRYNPEVDTAPHSAFYEVPYDATTSLLDALGYIKDNLAPDLSYRWSCRMAICGSCGMMVNNVPKLACKTFLRDYTDGMKVEALANFPIERDLVVDMTHFIESLEAIKPYIIGNSRTADQGTNIQTPAQMAKYHQFSGCINCGLCYAACPQFGLNPEFIGPAAITLAHRYNEDSRDHGKKERMAQLNSQNGVWSCTFVGYCSEVCPKHVDPAAAIQQGKVESSKDFLIATLKPR

SEQ ID NO: 26 - protein, 131 aa, Escherichia coli
MTTKRKPYVRPMTSTWWKKLPFYRFYMLREGTAVPAVWFSIELIFGLFALKNGPEAWAGFVDFLQNPVIVIINLITLAAALLHTKTWFELAPKAANIIVKDEKMGPEPIIKSLWAVTVVATIVILFVALYW

SEQ ID NO: 27 - protein, 119 aa, Escherichia coli
MINPNPKRSDEPVFWGLFGAGGMWSAIIAPVMILLVGILLPLGLFPGDALSYERVLAFAQSFIGRVFLFLMIVLPLWCGLHRMHHAMHDLKIHVPAGKWVFYGLAAILTVVTLIGVVTI

SEQ ID NO: 28 - protein, 548 aa, Escherichia coli
MSNKPFHYQAPFPLKKDDTEYYLLTSEHVSVSEFEGQEILKVAPEALTLLARQAFHDASFMLRPAHQQQVADILRDPEASENDKYVALQFLRNSDIAAKGVLPTCQDTGTAIIVGKKGQRVWTGGGDEAALARGVYNTYIEDNLRYSQNAPLDMYKEVNTGTNLPAQIDLYAVDGDEYKFLCIAKGGGSANKTYLYQETKALLTPGKLKNYLVEKMRTLGTAACPPYHIAFVIGGTSAETNLKTVKLASAKYYDELPTEGNEHGQAFRDVELEKELLIEAQNLGLGAQFGGKYFAHDIRVIRLPRHGASCPVGMGVSCSADRNIKAKINRQGIWIEKLEHNPGKYIPEELRKAGEGEAVRVDLNRPMKEILAQLSQYPVSTRLSLNGTIIVGRDIAHAKLKERMDNGEGLPQYIKDHPIYYAGPAKTPEGYASGSLGPTTAGRMDSYVDQLQAQGGSMIMLAKGNRSQQVTDACKKHGGFYLGSIGGPAAVLAQGSIKSLECVEYPELGMEAIWKIEVEDFPAFILVDDKGNDFFQQIQLTQCTRCVK

SEQ ID NO: 29 - protein, 548 aa, Escherichia coli
MSNKPFIYQAPFPMGKDNTEYYLLTSDYVSVADFDGETILKVEPEALTLLAQQAFHDASFMLRPAHQKQVAAILHDPEASENDKYVALQFLRNSEIAAKGVLPTCQDTGTAIIVGKKGQRVWTGGGDEETLSKGVYNTYIEDNLRYSQNAALDMYKEVNTGTNLPAQIDLYAVDGDEYKFLCVAKGGGSANKTYLYQETKALLTPGKLKNFLVEKMRTLGTAACPPYHIAFVIGGTSAETNLKTVKLASAHYYDELPTEGNEHGQAFRDVQLEQELLEEAQKLGLGAQFGGKYFAHDIRVIRLPRHGASCPVGMGVSCSADRNIKAKINREGIWIEKLEHNPGQYIPQELRQAGEGEAVKVDLNRPMKEILAQLSQYPVSTRLSLTGTIIVGRDIAHAKLKELIDAGKELPQYIKDHPIYYAGPAKTPAGYPSGSLGPTTAGRMDSYVDLLQSHGGSMIMLAKGNRSQQVTDACHKHGGFYLGSIGGPAAVLAQQSIKHLECVAYPELGMEAIWKIEVEDFPAFILVDDKGNDFFQQIVNKQCANCTK

SEQ ID NO: 30 - protein, 467 aa, Escherichia coli
MNTVRSEKDSMGAIDVPADKLWGAQTQRSLEHFRISTEKMPTSLIHALALTKRAAAKVNEDLGLLSEEKASAIRQAADEVLAGQHDDEFPLAIWQTGSGTQSNMNMNEVLANRASELLGGVRGMERKVHPNDDVNKSQSSNDVFPTAMHVAALLALRKQLIPQLKTLTQTLNEKSRAFADIVKIGRTHLQDATPLTLGQEISGWVAMLEHNLKHIEYSLPHVAELALGGTAVGTGLNTHPEYARRVADELAVITCAPFVTAPNKFEALATCDALVQAHGALKGLAASLMKIANDVRWLASGPRCGIGEISIPENEPGSSIMPGKVNPTQCEALTMLCCQVMGNDVAINMGGASGNFELNVFRPMVIHNFLQSVRLLADGMESFNKHCAVGIEPNRERINQLLNESLMLVTALNTHIGYDKAAEIAKKAHKEGLTLKAAALALGYLSEAEFDSWVRPEQMVGSMKAGR

SEQ ID NO: 31 - protein, 325 aa, Roseobacter denitrificans
MSFHPVEQAPGRLNRSELAVPGSQPQMFEKAAQSDVDVIFLDLEDAVAPDEKEQARKNIIKALNEIDWGTKSMSIRINGLDTHYMYRDVVDVVEQAGERLDLIMIPKVGTAADVYAVDMMVTQIEDAKGYSKRIGFEHIIETALGMQNVSEIAAASKRNESLHFGVADYAASTRARTTIIGGVNPDYSVLTDPDSDGNRATHWGDMWHYALARMVVAARANGLRPIDGPFGDFQDPDGYKAAAYRAAVLGCEGKWAIHPSQIALANEVMSPSEAEITKAKRILEAMAQAEAEGKGAVSLDGRLIDYASIRQAEVLVEKARQISGA

SEQ ID NO: 32 - protein, 398 aa, Chlorobium tepidum
MAKILEGPAMKLFNKWGIPVPNYVVIMDPKRLAQLGEANKWLRESKLVVKAHEAIGGRFKLGLVKIGLNLDEAIQASREMLGAKVGTAEVRQVIVAEMLDHDAEFYVSIIGNRDGAELLISKYGGVDIEDNWDSVRRIQIPLDEHPTIEQLTALAKEAGFEGEIAERVGKICSRLVLCFDNEDAQSIEINPLVIRKSDMRFAALDAVMNVDWDARFRHADWDFKPVSEIGRPFTEAEQQIMDIDSRIKGSVKFVEVPGGEIALLTAGGGASVFYADAVVARGGTIANYAEYSGDPPDWAVEALTETICRLPNIKHIIVGGAIANFTDVKATFSGIINGLRESKSKGYLEGVKIWVRRGGPNEAQGLAAIRKLQEEGFDIHVYDRSMPMTDIVDLALKS

SEQ ID NO: 33 - protein, 610 aa, Chlorobium tepidum
MSILANKDTRAVIIGGVAGVNAAKRMAQFDYLINRPLTVQAFVYPPEAGQQKEIFRGGELKNVTVYPSLAPALNEHPDINTALIYLGASRATEAAMEALESPNIQLVSMITEGVPEKDAKRLKKLAQKLGKMLNGPSSIGIMSAGECRLGVIGGEYRNLKLCNLYRQGSFGVLTKSGGLSNEAMWLCAQNGDGITSAVAIGGDAYPGTDFVTYLEMFEKDPATKAVVMIGEVGGNLEEEAAEWLAAEPRRIKLIAAIGGTCQEVLPQGMKFGHAGAKEGKKGAGSARSKMNALREAGALVPDTFGGLSKAIKQVYEELLASGAIKPKPEIDEALLPELPPSVQEVMKQGEVVVEPLIRTTISDDRGEEPRYAGYAASELCSKGYGIEDVIGLLWSKKLPSREESEIIKRIIMISADHGPAVSGAFGTILAACAGIDMPQAVSAGMTMIGPRFGGAVTNAGKYFKMGVKEYPNDIPGFLAWMKKNVGPVPGIGHRVKSLRNPDQRVKYLVSYVKNETSLHTPILNYALEVEKITTAKKENLILNVDGTIGCILMDLGFPEHSLNGFFVLARTIGMIGHWIDQNNQNSRLIRLYDYLINYAVKPERPVPDKK

SEQ ID NO: 34 - protein, 429 aa, Hydrogenobacter thermophilus
MNLYEYEAYDKIFKKYGIPTPEYMFESSVSDRLVEFVNQLGECVVKSQVLVGKRGKAGAVKVCSDPQSAIETAQALLNYPVYGEMPVGVLVARKVNILKELYASITYSTEVRAPVLTLSLEGGMDIEEVPPEKVRSWTINPLKGLYPHMVRNYLLELGFPQEYMGILRELSEVVSNMYRAFWEAEARLLEINPLAICDVNGKLKVYALDAVVTIDDDASVPPSKIYGVRTAMKRPPTEREIEASLIDRDDHRGKAGSYVEVDGDIAMMTFGGGGSTVTIETTYAIGLKPANFTDIGGNPPAEKMYKITKIILSKPGIRGVLVCGGTANNTRIDVTLGEGVANAIRDLYKEGKLNPDWIWVVRRNGPEAEKGLRMLYEAFKECKVKGEIYDSSLPLTEAPIRLKELLDICTSAQSEDRHLTEEQAKDMGI

SEQ ID NO: 35 - protein, 344 aa, Hydrogenobacter thermophilus
MERRWKIGTPYLNDSTRIIVMGITGREASQVVAESEALYPGFVVAGVTPGKGGSEVAGVPVYNTVREAQERHPEINTGIVYVPPASVKDAVIELIDAGIGVIFIITEHVPIRDTVYFYHYAKERGTIIVGPTSLGCIIPKIPARIGAIGGKDPSVAYADGGLVILSKSGGLTTTTAEMFKRRGWGVYMALALGGDVISCTTFADAIENLADDPNVKGVIIQGEVGGSYEEQAAETILRLWKEGRWNKPVAAFVAGRFQESLEGVSFGHAGAIVERGKGKATDKIRAFNEVGKITGLVKVAEFYHDLVHCIEELGVPRDFEDSTPEGKVKPLYSTINEENCQFKA

SEQ ID NO: 36 - protein, 259 aa, Hydrogenobacter thermophilus
MERIWKTGITQHIGHETYIRGYRLLDLVGNLSFAQAIYLILKGELPTERESRMMEAMLVSVIDHGIAPPSAIAARSVASGGNSLNVGVAAGVLAFGSAHGGALEDAMRFIQEGVSSKRSVEDIVKEYLETKKPIPGYGHRYYKDFDPRTKRLMDIARVLEFYGEHCKFAEDVAEEIGRQKGKKLVLNVDGAIAAIASEMGFDWRLGKGFFIIGRVPGLVAHVYEELTTEKPFSKRLDEERDVEYTGSPPRELPQELKKI

SEQ ID NO: 37 - protein, 310 aa, Chlorobaculum tepidum
MKITVIGAGNVGATTAFRLAEKQLARELVLLDVVEGIPQGKALDMYESGPVGLFDTKVTGSNDYADTANSDIVVITAGLPRKPGMTREDLLSMNAGIVREVTGRIMEHSKNPIIVVVSNPLDIMTHVAWQKSGLPKERVIGMAGVLDSARFRSFIAMELGVSMQDVTACVLGGHGDAMVPVVKYTTVAGIPVADLISAERIAELVERTRTGGAEIVNHLKQGSAFYAPATSVVEMVESIVLDRKRVLTCAVSLDGQYGIDGTFVGVPVKLGKNGVEHIYEIKLDQSDLDLLQKSAKIVDENCKMLDASQG

SEQ ID NO: 38 - protein, 548 aa, Escherichia coli; identical to SEQ ID NO: 28

SEQ ID NO: 39 - protein, 548 aa, Escherichia coli; identical to SEQ ID NO: 29

SEQ ID NO: 40 - protein, 467 aa, Escherichia coli; identical to SEQ ID NO: 30

SEQ ID NO: 41 - protein, 588 aa, Escherichia coli
MKLPVREFDAVVIGAGGAGMRAALQISQSGQTCALLSKVFPTRSHTVSAQGGITVALGNTHEDNWEWHMYDTVKGSDYIGDQDAIEYMCKTGPEAILELEHMGLPFSRLDDGRIYQRPFGGQSKNFGGEQAARTAAAADRTGHALLHTLYQQNLKNHTTIFSEWYALDLVKNQDGAVVGCTALCIETGEVVYFKARATVLATGGAGRIYQSTTNAHINTGDGVGMAIRAGVPVQDMEMWQFHPTGIAGAGVLVTEGCRGEGGYLLNKHGERFMERYAPNAKDLAGRDVVARSIMIEIREGRGCDGPWGPHAKLKLDHLGKEVLESRLPGILELSRTFAHVDPVKEPIPVIPTCHYMMGGIPTKVTGQALTVNEKGEDVVVPGLFAVGEIACVSVHGANRLGGNSLLDLVVFGRAAGLHLQESIAEQGALRDASESDVEASLDRLNRWNNNRNGEDPVAIRKALQECMQHNFSVFREGDAMAKGLEQLKVIRERLKNARLDDTSSEFNTQRVECLELDNLMETAYATAVSANFRTESRGAHSRFDFPDRDDENWLCHSLYLPESESMTRRSVNMEPKLRPAFPPKIRTY

SEQ ID NO: 42 - protein, 238 aa, Escherichia coli
MRLEFSIYRYNPDVDDAPRMQDYTLEADEGRDMMLLDALIQLKEKDPSLSFRRSCREGVCGSDGLNMNGKNGLACITPISALNQPGKKIVIRPLPGLPVIRDLVVDMGQFYAQYEKIKPYLLNNGQNPPAREHLQMPEQREKLDGLYECILCACCSTSCPSFWWNPDKFIGPAGLLAAYRFLIDSRDTETDSRLDGLSDAFSVFRCHSIMNCVSVCPKGLNPTRAIGHIKSMLLQRNA

SEQ ID NO: 43 - protein, 129 aa, Escherichia coli [sequence omitted]

SEQ ID NO: 44 - protein, 115 aa, Escherichia coli
MVSNASALGRNGVHDFILVRATAIVLTLYIIYMVGFFATSGELTYEVWIGFFASAFTKVFTLLALFSILIHAWIGMWQVLTDYVKPLALRLMLQLVIVVALVVYVIYGFVVVWGV

SEQ ID NO: 45 - protein, 289 aa, Escherichia coli
MSILIDKNTKVICQGFTGSQGTFHSEQAIAYGTKMVGGVTPGKGGTTHLGLPVFNTVREAVAATGATASVIYVPAPFCKDSILEAIDAGIKLIITITEGIPTLDMLTVKVKLDEAGVRMIGPNCPGVITPGECKIGIQPGHIHKPGKVGIVSRSGTLTYEAVKQTTDYGFGQSTCVGIGGDPIPGSNFIDILEMFEKDPQTEAIVMIGEIGGSAEEEAAAYIKEHVTKPVVGYIAGVTAPKGKRMGHAGAIIAGGKGTADEKFAALEAAGVKTVRSLADIGEALKTVLK

SEQ ID NO: 46 - protein, 388 aa, Escherichia coli
MNLHEYQAKQLFARYGLPAPVGYACTTPREAEEAASKIGAGPWVVKCQVHAGGRGKAGGVKVVNSKEDIRAFAENWLGKRLVTYQTDANGQPVNQILVEAATDIAKELYLGAVVDRSSRRVVFMASTEGGVEIEKVAEETPHLIHKVALDPLTGPMPYQGRELAFKLGLEGKLVQQFTKIFMGLATIFLERDLALIEINPLVITKQGDLICLDGKLGADGNALFRQPDLREMRDQSQEDPREAQAAQWELNYVALDGNIGCMVNGAGLAMGTMDIVKLHGGEPANFLDVGGGATKERVTEAFKIILSDDKVKAVLVNIFGGIVRCDLIADGIIGAVAEVGVNVPVVVRLEGNNAELGAKKLADSGLNIIAAKGLTDAAQQVVAAVEGK

SEQ ID NO: 47 - protein, 607 aa, Hydrogenobacter thermophilus
MAFDLTIKIGGEGGEGVISAGDFLTESAARAGYYVVNFKSFPAEIKGGYAQSTIRVSNKKLYTTGDGFDILCCFNGEAYEFNRKHLRPGTVLVYDSSDFEPEEHEGVVMYPVPLSHLAKDIMKAYITKNVIALGVLCGLFDIPVQSIKDSIKAKFLRKGQEIIELNYKALETGINYVRENIKKLDGYLFPPAKEPKDVVIMEGNQAIAKGAVVAGCKFYAAYPITPATTVGNYIVEDLIRVGGWLYQAEDEIASLGMALGASFAGVKAMTATSGPGLCLMTEFISYAGMTELPIVIVDVQRVGPATGMPTKHEQGDLYHAIYSGHGEIPRAVLAPTNVEESFYLTVEAFNLAEKYQIPVIVLTDASLSLRAEAFPTPKVKDIKVINRWVYNAEDDPEGKFRRAGRFLRYALFTEDGITPMGVPGDPNAIHAITGLERQENSDPRNRPDIRTWQMDKRFKKMEKLLREDAEKFYEMDAPFEKADIGIISWGLTASATKEAVERLRSKGRKINALYPKLLWPLRVDILENFAKSCRRIIMPESNYSGQLATVLRAETRIRPISYCIYRGEPFIPREIEEFIEYVLENSYIEEGKFTPANLYGEKAYGLI

SEQ ID NO: 48 - protein, 295 aa, Hydrogenobacter thermophilus
MLEVHLKPADYKSDVEPTWCSGCGDFGVVAALTRAYSELGLKPENIVSVSGIGCSSRLPLFVKNYSVHSLHGRAIPVAVGIKLARPDLTVIVETGDGDLFSIGAGHNPHAARRNIDITVICMDNQVYGLTKNQVSPTSREGLYGSLTPYGSIDRPVNPIATMLSYGATFVAQTYAGNLKHMTEVIKQAIQHKGFSFVNVISPCPTFNKVDTFQYYKGKVKDINEQGHDPSDYRKALELAFHDLDHYHDPNAPVPIGVFYKAELETYEDRMQSVKRRYKQVEDVQELIDMCKPKAL

SEQ ID NO: 49 - protein, 741 aa, Chlorobium limicola
MATTSKIIYTKIDEAPALATYSLLPVIQAFTRGTGVEVETRDISLAGRIIANFPDNLTDDQKISDQLAELGELALKPEANIIKLPNISASIPQLKAAIAELQDHGYKVPDYPEAPATDAEKEIQTRYAKVLGSAVNPVLREGNSDRRAPLSVKQFTKKHPHRMGAWSSDSMSHVAHMKDGDFYGSEKSLTVGAPTSVRIEFVDGSGNVKVLKEKTALLEGEVIDTAVMNVRSLRQFFADQIADARESGILLSLHLKATMMKVSDPVMFGHAVTVFFKDVFEKHAAVIKELGVNVNNGLGDLYAKIRNLPEEQRAGIESDIQAVYPARPALAMVDSDKGITNLHVPNDIIVDASMPVVIRDSGKMWGPDGKLHDTKAMIPDRCYATMYQAMVEDCQKNGAFDPAVIGTVPNVGLMAQKAEEYGSHDKTFMAPGNGSIRVVDASGSVLMEQKVEENDIFRMCQVKDAPIRDWVKLAVNRARATGSPAVFWLDSNRAHDREIIAKVNEYLKEHDTTGLEICILHPVEAMKFTLERFRAGNDTISVTGNVLRDYLTDLFPIIELGTSAKMLSIVPLMNGGGLFETGAGGSAPKHVQQFQKEGYLRWDSLGEFSALAASLEHLAKAFNNSKAQVLADTLDQAIGKFLDNSKSPARKVGQIDNRGSHFYLALYWAQALAAQSTDQELQARFVEVAGQLAENEEKINAELIGAQGSPVDMGGYYHPNDELTRKAMRPSATFNAIIDAL

SEQ ID NO: 50 - protein, 360 aa, Saccharomyces cerevisiae
MLNRTIAKRTLATAAQAERTLPKKYGGRFTVTLIPGDGVGKEITDSVRTIFEAENIPIDWETINIKQTDHKEGVYEAVESLKRNKIGLKGLWHTPADQTGHGSLNVALRKQLDIYANVALFKSLKGVKTRIPDIDLIVIRENTEGEFSGLEHESVPGVVESLKVMTRPKTERIARFAFDFAKKYNRKSVTAVHKANIMKLGDGLFRNIITEIGQKEYPDIDVSSIIVDNASMQAVAKPHQFDVLVTPSMYGTILGNIGAALIGGPGLVAGANFGRDYAVFEPGSRHVGLDIKGQNVANPTAMILSSTLMLNHLGLNEYATRISKAVHETIAEGKHTTRDIGGSSSTTDFTNEIINKLSTM

SEQ ID NO: 51 - protein, 369 aa, Saccharomyces cerevisiae
MLRNTFFRNTSRRFLATVKQPSIGRYTGKPNPSTGKYTVSFIEGDGIGPEISKSVKKIFSAANVPIEWESCDVSPIFVNGLTTIPDPAVQSITKNLVALKGPLATPIGKGHRSLNLTLRKTFGLFANVRPAKSIEGFKTTYENVDLVLIRENTEGEYSGIEHIVCPGVVQSIKLITRDASERVIRYAFEYARAIGRPRVIVVHKSTIQRLADGLFVNVAKELSKEYPDLTLETELIDNSVLKVVTNPSAYTDAVSVCPNLYGDILSDLNSGLSAGSLGLTPSANIGHKISIFEAVHGSAPDIAGQDKANPTALLLSSVMMLNHMGLTNHADQIQNAVLSTIASGPENRTGDLAGTATTSSFTEAVIKRL

SEQ ID NO: 52 - protein, 891 aa, Escherichia coli
MSSTLREASKDTLQAKDKTYHYYSLPLAAKSLGDITRLPKSLKVLLENLLRWQDGNSVTEEDIHALAGWLKNAHADREIAYRPARVLMQDFTGVPAVVDLAAMREAVKRLGGDTAKVNPLSPVDLVIDHSVTVDRFGDDEAFEENVRLEMERNHERYVFLKWGKQAFSRFSVVPPGTGICHQVNLEYLGKAVWSELQDGEWIAYPDTLVGTDSHTTMINGLGVLGWGVGGIEAEAAMLGQPVSMLIPDVVGFKLTGKLREGITATDLVLTVTQMLRKHGVVGKFVEFYGDGLDSLPLADRATIANMSPEYGATCGFFPIDAVTLDYMRLSGRSEDQVELVEKYAKAQGMWRNPGDEPIFTSTLELDMNDVEASLAGPKRPQDRVALPDVPKAFAASNELEVNATHKDRQPVDYVMNGHQYQLPDGAVVIAAITSCTNTSNPSVLMAAGLLAKKAVTLGLKRQPWVKASLAPGSKVVSDYLAKAKLTPYLDELGFNLVGYGCTTCIGNSGPLPDPIETAIKKGDLTVGAVLSGNRNFEGRIHPLVKTNWLASPPLVVAYALAGNMNINLASEPIGHDRKGDPVYLKDIWPSAQEIARAVEQVSTEMFRKEYAEVFEGTAEWKGINVTRSDTYGWQEDSTYIRLSPFFDEMQATPAPVEDIHGARILAMLGDSVTTDHISPAGSIKPDSPAGRYLQGRGVERKDFNSYGSRRGNHEVMMRGTFANIRIRNEMVPGVEGGMTRHLPDSDVVSIYDAAMRYKQEQTPLAVIAGKEYGSGSSRDWAAKGPRLLGIRVVIAESFERIHRSNLIGMGILPLEFPQGVTRKTLGLTGEEKIDIGDLQNLQPGATVPVTLTRADGSQEVVPCRCRIDTATELTYYQNDGILHYVIRNMLK

SEQ ID NO: 53 - protein, 865 aa, Escherichia coli
MLEEYRKHVAERAAEGIAPKPLDANQMAALVELLKNPPAGEEEFLLDLLTNRVPPGVDEAAYVKAGFLAAIAKGEAKSPLLTPEKAIELLGTMQGGYNIHPLIDALDDAKLAPIAAKALSHTLLMFDNFYDVEEKAKAGNEYAKQVMQSWADAEWFLNRPALAEKLTVTVFKVTGETNTDDLSPAPDAWSRPDIPLHALAMLKNAREGIEPDQPGVVGPIKQIEALQQKGFPLAYVGDVVGTGSSRKSATNSVLWFMGDDIPHVPNKRGGGLCLGGKIAPIFFNTMEDAGALPIEVDVSNLNMGDVIDVYPYKGEVRNHETGELLATFELKTDVLIDEVRAGGRIPLIIGRGLTTKAREALGLPHSDVFRQAKDVAESDRGFSLAQKMVGRACGVKGIRPGAYCEPKMTSVGSQDTTGPMTRDELKDLACLGFSADLVMQSFCHTAAYPKPVDVNTHHTLPDFIMNRGGVSLRPGDGVIHSWLNRMLLPDTVGTGGDSHTRFPIGISFPAGSGLVAFAAATGVMPLDMPESVLVRFKGKMQPGITLRDLVHAIPLYAIKQGLLTVEKKGKKNIFSGRILEIEGLPDLKVEQAFELTDASAERSAAGCTIKLNKEPIIEYLNSNIVLLKWMIAEGYGDRRTLERRIQGMEKWLANPELLEADADAEYAAVIDIDLADIKEPILCAPNDPDDARPLSAVQGEKIDEVFIGSCMTNIGHFRAAGKLLDAHKGQLPTRLWVAPPTRMDAAQLTEEGYYSVFGKSGARIEIPGCSLCMGNQARVADGATVVSTSTRNFPNRLGTGANVFLASAELAAVAALIGKLPTPEEYQTYVAQVDKTAVDTYRYLNFNQLSQYTEKADGVIFQTAV

SEQ ID NO: 54 - protein, 396 aa, Homo sapiens
MLKDNQIRKSLSGNEAVAIAMKQIEPDVVAAFPITPFTEVPQYFSTFVAEGKCNTEFVPVESEHSAMSACVGASSAGARVMTATSSNGLGLMWEMLHIAAGDRCPIILALVNRAMSPPLNIHNDHSDSMGARDAGWIQIYSENTQEAYDNFIQIVKVAENEKVMVPAMVCYDGFITSHAVENVTLLEDSAVKEFVGENKRVNDGLLGEDSMAVGPMVLTDFYMEMKRSQLQGLLNAKEVLLEVSKEYEKLTGRKYGLFEEYKLSDADIAMVIIGSSAGTGKKVVDDLREKGIKAGLLKIRLYRPFPGKEIAKALKNVKALAVMDKAEGLSGNGGPIFTDVSAAIYGELKDAILMSYIYGLGGRDVRVEDLEKVFMELKEAMETGNYDKYNYLSLRE

SEQ ID NO: 55 - protein, 316 aa, Homo sapiens
MATLKELTHIPDRITSGHRMCAGCGAPMVVKWVMKAVKPENKVVVSNATGCLEVSTTLYPYSAWKDSFIHTAFENAAATMSGVEAAYKNLKGKGKVKDNYKFIAFGGDGGTYDIGFQSLSGAMERGHDMLYVCYDNGAYMNTGIQRSSATPAGADTTTSPKGKQSSGKTQFSKDLTMIMASHNIPYVAQTVPVIPGTKYTLDLYNKSNRAINEIKGAKFINVIAPCPRGWRCDTATELEAIKLAVETCYWPLYEVINGEFKLSYKPKNKLPIEEWLKVQGRFSHLLKSEEGRGKIEEIQKEIDRRWEKLLFLCEEK

SEQ ID NO: 56 - protein, 194 aa, Homo sapiens
MDKKLMEIRWHGRGGQGAKTASLLLAEAAFNAGMYIQGFPEYGPERMGAPITAYNRISNFPLRVHSNIYEPDYVVVVDETLLKTGVCTKGLKKEGGIIVNTKKTPNEIRKELDGYEGKVYTINARKISEEALGAYFPNTPMLGAIVRVTNIIDIDKFIGDMEGSFKHKFESKPHFIPKNMEALKRGIQEVNGIE

SEQ ID NO: 57 - protein, 101 aa, Homo sapiens
MELSNKMNVNSKTPWTEVPRGGIIYAGGNAVEFNTGDWRVMKPIWYEDKCKHCMFCWAVCPDMSIIVENEKVIGFDYDHCKGCGVCVDQCNFNALELVEEE

SEQ ID NO: 58 - protein, 792 aa, Escherichia coli
MSNNGSSPLVLWYNQLGMNDVDRVGGKNASLGEMITNLSGMGVSVPNGFATTADAFNQFLDQSGVNQRIYELLDKTDIDDVTQLAKAGAQIRQWIIDTPFQPELENAIREAYAQLSADDENASFAVRSSATAEDMPDASFAGQQETFLNVQGFDAVLVAVKHVFASLFNDRAISYRVHQGYDHRGVALSAGVQRMVRSDLASSGVMFSIDTESGFDQVVFITSAWGLGEMVVQGAVNPDEFYVHKPTLAANRPAIVRRTMGSKKIRMVYAPTQEHGKQVKIEDVPQEQRDIFSLTNEEVQELAKQAVQIEKHYGRPMDIEWAKDGHTGKLFIVQARPETVRSRGQVMERYTLHSQGKIIAEGRAIGHRIGAGPVKVIHDISEMNRIEPGDVLVTDMTDPDWEPIMKKASAIVTNRGGRTCHAAIIARELGIPAVVGCGDATERMKDGENVTVSCAEGDTGYVYAELLEFSVKSSSVETMPDLPLKVMMNVGNPDRAFDFACLPNEGVGLARLEFIINRMIGVHPRALLEFDDQEPQLQNEIREMMKGFDSPREFYVGRLTEGIATLGAAFYPKRVIVRLSDFKSNEYANLVGGERYEPDEENPMLGFRGAGRYVSDSFRDCFALECEAVKRVRNDMGLTNVEIMIPFVRTVDQAKAVVEELARQGLKRGENGLKIIMMCEIPSNALLAEQFLEYFDGFSIGSNDMTQLALGLDRDSGVVSELFDERNDAVKALLSMAIRAAKKQGKYVGICGQGPSDHEDFAAWLMEEGIDSLSLNPDTVVQTWLSLAELKK

SEQ ID NO: 59 - protein, 883 aa, Escherichia coli
MNEQYSALRSNVSMLGKVLGETIKDALGEHILERVETIRKLSKSSRAGNDANRQELLTTLQNLSNDELLPVARAFSQFLNLANTAEQYHSISPKGEAASNPEVIARTLRKLKNQPELSEDTIKKAVESLSLELVLTAHPTEITRRTLIHKMVEVNACLKQLDNKDIADYEHNQLMRRLRQLIAQSWHTDEIRKLRPSPVDEAKWGFAVVENSLWQGVPNYLRELNEQLEENLGYKLPVEFVPVRFTSWMGGDRDGNPNVTADITRHVLLLSRWKATDLFLKDIQVLVSELSMVEATPELLALVGEEGAAEPYRYLMKNLRSRLMATQAWLEARLKGEELPKPEGLLTQNEELWEPLYACYQSLQACGMGIIANGDLLDTLRRVKCFGVPLVRIDIRQESTRHTEALGELTRYLGIGDYESWSEADKQAFLIRELNSKRPLLPRNWQPSAETREVLDTCQVIAEAPQGSIAAYVISMAKTPSDVLAVHLLLKEAGIGFAMPVAPLFETLDDLNNANDVMTQLLNIDWYRGLIQGKQMVMIGYSDSAKDAGVMAASWAQYQAQDALIKTCEKAGIELTLFHGRGGSIGRGGAPAHAALLSQPPGSLKGGLRVTEQGEMIRFKYGLPEITVSSLSLYTGAILEANLLPPPEPKESWRRIMDELSVISCDVYRGYVRENKDFVPYFRSATPEQELGKLPLGSRPAKRRPTGGVESLRAIPWIFAWTQNRLMLPAWLGAGTALQKVVEDGKQSELEAMCRDWPFFSTRLGMLEMVFAKADLWLAEYYDQRLVDKALWPLGKELRNLQEEDIKVVLAIANDSHLMADLPWIAESIQLRNIYTDPLNVLQAELLHRSRQAEKEGQEPDPRVEQALMVTIAGIAAGMRNTG

SEQ ID NO: 60 - protein, 893 aa, Moorella thermoacetica
  MOD_RES (358)..(358): Variable amino acid
MVNLTIDGQRVTAPEGMTILEVARENGIHIPTLCHHPKLRPLGYCRLCLVDIEGAAKPMTACNTPVAEGMVIRTSTPVIEEMRKGIIEMLLSLHPEDCLTCEKAGNCQLQDCAYTYGVKHGELPVKREELPVLKENPFIVRDYNKCIVCGRCVRACQEVQVQRVVDLVGKGSAARVGATKAGAEVSLEEGGCVFCGNCVQVCPVGALTEKAGLGQGREWEFKKVRSICSYCGVGCNLTLYVKDGKVVKVRGYENPEVNNGWLCVKGRFGFDYIHNPDRITRPLIREGDREKGYFREASWEEALALVSQKLTQIKGSYGSEALGFLCSAKCTNEENYLLQKLARGVLGTNNVDHCARLXHSSTVAGLATTFGSGAMTNSIADIASADCIFVIGSNTTENHPVIALKVKEAVRRGARLIVADPRRIELVNFSYLWLRQKPGTDLALLNGLLHVIIKEELYDKEFIAQRTEGFEALKLAVEEYTPAKVSEVTGVPAGDIIEAARTYARGPSSTILYAMGITQHITGTANVMALANLAMACGQVGKEGNGVNPLRGQSNVQGACDMGGLPNVLPGYQPVTDPGVRHKFSETWGVPDLPGEPGLTLMEMMAAAQEGKLKGMYILGENPVLTDPDVSHVKEALKNLEFLVVQDIFLTETARMADVVLPGASFAEKEGTFTSTERRVQLLHKAIEPPGEARPDWLILNDLLLLMGYPRKYSSPGEIMQEIAGLTPSYAGITYERLEDKGLQWPVLSLEHPGTPVLHREKFSRGYGQFQVVHYRPPAEEPDEEYPFLFTTGRNLYHYHTVISRKSRGLEEMCPAPVVEINDNDAARLGIREGEMIEIVSRRGKVRVKALVTDRIPRGQVFMNFHFHEAAANLLTIAALDPVAKIPIIKPVL

SEQ ID NO: 61 - protein, 707 aa, Moorella thermoacetica
MGEVVFSTWGGKVVDHRGGPSGGGPSWAGEFGGRQLKAFIGWDGLVVTDPAVDLLAALQAYYQAVQGESCGRCVPCRVGTRVIYNVLVRIAGGEGLPSDLDLLRRVAWIVRDGSLCELGQAGAKAVLDFLDYYSEALRPFLEDSGRVAGGQRRPGPGGRVQVLASGRVLVGNDRGKGAAAASPAAGLTYKPFVTAPCLKRCPAHLDIPAYIDAIKDGRYEESLAIIRQRTALAGVLGRVCVHPCEENCRRGNVDEPLAIRGLKRFVADYEVKRGRRPVAVCGGNLFTGPWRPAGQAGGEETTAVTSGKKVAIIGAGPAGLSAAYQLAGRGYKVTIFEALPVAGGMLAVGIPSYRLPRDILAGEIEAIKALGVTINLNTRVGVDVTMDQLQRDYDAVFIATGLHASSRMGVAGEDEGYGGFIPGVKFLRDLNLDRCPSLEGKVVAVVGGGNVAMDCARSALRRGAREVHLIYRRSRAEMPAHATEVRDAEAEGVIYHFLVNPTALVAEKGNIKGMQCVRMKLGEPDDSGRRRPVPVPGTEFFLPCDIVVPAIGQAADLSFLDGRIEVGKRGTISVDPVTLATSVPGVFAGGDIVLGARTVVEAVAQGNRAAVSIDQYLRQGTTSPTVEDELDAWLEKVGVYDPEEDVGIYGGRPRQAERVAPLAERVKDFREVEGGFDFYAGRAEAERCLRCYRVGMMVLAGEGESNG

SEQ ID NO: 62 - protein, 555 aa, Clostridium acidurici
MKTDIQIAQEAQMKHIKDVAELIDIHEDDLELYGKYKAKVSLDVLDQLKDKPDGLVLVTAINPTPAGEGKTTTNIGLSMGLNKLGKKTSTALREPSLGPSFGVKGGAAGGGYAQVVPMADINLHFTGDFHAITSAHSLLAALVDNHLHHGNALRIDTNRIVWKRVVDMNDRALRKIVVGLGGKAQGITREDGFDITVASEIMAILCLANDREDLKERLGNMVVAYNVDGDAVRAKDLEAQGALTLILKDAINPNIVQTLENTPAFIHGGPFANIAHGCNSVLATKLALKTGDYAVTEAGFGADLGAEKFFDIKCRYAGLNPDVAVIVATVRALKMHGGVAKEDLGTENLDALAKGMTNLERHIENVAKFGVPSVVAINAFPTDTEAEKQLVFDKCKEMGVDVAISDVFAKGGDGGVELAQKVIDVCENKKSDFKVLYDVEESIPEKITKIAKEIYRADKVNFSKAAKKQIAELEKLGLDKLPICMAKTQYSFSDDPALLGAPEGFELTIRDLELAAGAGFIVALTGDIMRMPGLPKVPAANRMDVLPNGEIIGLF

SEQ ID NO: 63 - protein, 288 aa, Escherichia coli
MAAKIIDGKTIAQQVRSEVAQKVQARIAAGLRAPGLAVVLVGSNPASQIYVASKRKACEEVGFVSRSYDLPETTSEAELLELIDTLNADNTIDGILVQLPLPAGIDNVKVLERIHPDKDVDGFHPYNVGRLCQRAPRLRPCTPRGIVTLLERYNIDTFGLNAVVIGASNIVGRPMSMELLLAGCTTTVTHRFTKNLRHHVENADLLIVAVGKPGFIPGDWIKEGAIVIDVGINRLENGKVVGDVVFEDAAKRASYITPVPGGVGPMTVATLIENTLQACVEYHDPQDE

SEQ ID NO: 64 - protein, 296 aa, Escherichia coli
MSFFHASQRDALNQSLAEVQGQINVSFEFFPPRTSEMEQTLWNSIDRLSSLKPKFVSVTYGANSGERDRTHSIIKGIKDRTGLEAAPHLTCIDATPDELRTIARDYWNNGIRHIVALRGDLPPGSGKPEMYASDLVTLLKEVADFDISVAAYPEVHPEAKSAQADLLNLKRKVDAGANRAITQFFFDVESYLRFRDRCVSAGIDVEIIPGILPVSNFKQAKKFADMTNVRIPAWMAQMFDGLDDDAETRKLVGANIAMDMVKILSREGVKDFHFYTLNRAEMSYAICHTLGVRPGL

SEQ ID NO: 65 - protein, 262 aa, Moorella thermoacetica
MLIIGERINGMFGDIKRAIQERDPAPVQEWARRQEEGGARALDLNVGPAVQDKVSAMEWLVEVTQEVSNLTLCLDSTNIKAIEAGLKKCKNRAMINSTNAEREKVEKLFPLAVEHGAALIGLTMNKTGIPKDSDTRLAFAMELVAAADEFGLPMEDLYIDPLILPANVAQDHAPEVLKTLQQIKMLADPAPKTVLGLSNVSQNCQNRPLINRTFLAMAMACGLDAAIADACDEALIETAATAEILLNQTVYCDSFVKMFKTR

SEQ ID NO: 66 - protein, 674 aa, Moorella thermoacetica
MPRFRDLSHNCRPSEAPRVMEPKNRDRTVDPAVLEMLVKSKDDKVITAFDRFVAQQPQCKIGYEGICCRFCMAGPCRIKATDGPGSRGICGASAWTIVARNVGLMILTGAAAHCEHGNHIAHALVEMAEGKAPDYSVKDEAKLKEVCRRVGIEVEGKSVLELAQEVGEKALEDFRRLKGEGEATWLMTTINEGRKEKFRTHNVVPFGIHASISELVNQAHMGMDNDPVNLVFSAIRVALADYTGEHIATDFSDILFGTPQPVVSEANMGVLDPDQVNFVLHGHNPLLSEIIVQAAREMEGEAKAAGAKGINLVGICCTGNEVLMRQGIPLVTSFASQELAICTGAIDAMCVDVQCIMPSISAVAECYHTRIITTADNAKIPGAYHIDYQTATAIESAKTAIRMAIEAFKERKESNRPVYIPQIKNRVVAGWSLEALTKLLATQNAQNPIRVLNQAILDGELAGVALICGCNNLKGFQDNSHLTVMKELLKNNVFVVATGCSAQAAGKLGLLDPANVETYCGDGLKGFLKRLGEGANIEIGLPPVFHMGSCVDNSRAVDLLMAMANDLGVDTPKVPFVASAPEAMSGKAAAIGTWWVSLGVPTHVGTMPPVEGSDLIYSILTQIASDVYGGYFIFEMDPQVAARKILDALEYRTWKLGVHKEVAERYETKLCQGY

SEQ ID NO: 67 - protein, 729 aa, Moorella thermoacetica
MTDFDKIFEGAIPEGKEPVALFREVYHGAITATSYAEILLNQAIRTYGPDHPVGYPDTAYYLPVIRCFSGEEVKKLGDLPPILNRKRAQVSPVLNFENARLAGEATWYAAEIIEALRYLKYKPDEPLLPPPWTGFIGDPVVRRFGIKMVDWTIPGEAIILGRAKDSKALAKIVKELMGMGFMLFICDEAVEQLLEENVKLGIDYIAYPLGNFTQIVHAANYALRAGMMFGGVTPGAREEQRDYQRRRIRAFVLYLGEHDMVKTAAAFGAIFTGFPVITDQPLPEDKQIPDWFFSVEDYDKIVQIAMETRGIKLTKIKLDLPINFGPAFEGESIRKGDMYVEMGGNRTPAFELVRTVSESEITDGKIEVIGPDIDQIPEGSKLPLGILVDIYGRKMQADFEGVLERRIHDFINYGEGLWHTGQRNINWLRVSKDAVAKGFRFKNYGEILVAKMKEEFPAIVDRVQVTIFTDEAKVKEYMEVAREKYKERDDRMRGLTDETVDTFYSCVLCQSFAPNHVCIVTPERVGLCGAVSWLDAKASYEINHAGPNQPIPKEGEIDPIKGIWKSVNDYLYTASNRNLEQVCLYTLMENPMTSCGCFEAIMAILPECNGIMITTRDHAGMTPSGMTFSTLAGMIGGGTQTPGFMGIGRTYIVSKKFISADGGIARIVWMPKSLKDFLHDEFVRRSVEEGLGEDFIDKIADETIGTTVDEILPYLEEKGHPALTMDPIM

SEQ ID NO: 68 - protein, 533 aa, Escherichia coli
MTEQATTTDELAFTRPYGEQEKQILTAEAVEFLTELVTHFTPQRNKLLAARIQQQQDIDNGTLPDFISETASIRDADWKIRGIPADLEDRRVEITGPVERKMVINALNANVKVFMADFEDSLAPDWNKVIDGQINLRDAVNGTISYTNEAGKIYQLKPNPAVLICRVRGLHLPEKHVTWRGEAIPGSLFDFALYFFHNYQALLAKGSGPYFYLPKTQSWQEAAWWSEVFSYAEDRFNLPRGTIKATLLIETLPAVFQMDEILHALRDHIVGLNCGRWDYIFSYIKTLKNYPDRVLPDRQAVTMDKPFLNAYSRLLIKTCHKRGAFAMGGMAAFIPSKDEEHNNQVLNKVKADKSLEANNGHDGTWIAHPGLADTAMAVFNDILGSRKNQLEVMREQDAPITADQLLAPCDGERTEEGMRANIRVAVQYIEAWISGNGCVPIYGLMEDAATAEISRTSIWQWIHHQKTLSNGKPVTKALFRQMLGEEMKVIASELGEERFSQGRFDDAARLMEQITTSDELIDFLTLPGYRLLA

SEQ ID NO: 69 - protein, 723 aa, Escherichia coli
MSQTITQSRLRIDANFKRFVDEEVLPGTGLDAAAFWRNFDEIVHDLAPENRQLLAERDRIQAALDEWHRSNPGPVKDKAAYKSFLRELGYLVPQPERVTVETTGIDSEITSQAGPQLVVPAMNARYALNAANARWGSLYDALYGSDIIPQEGAMVSGYDPQRGEQVIAWVRRFLDESLPLENGSYQDVVAFKVVDKQLRIQLKNGKETTLRTPAQFVGYRGDAAAPTCILLKNNGLHIELQIDANGRIGKDDPAHINDVIVEAAISTILDCEDSVAAVDAEDKILLYRNLLGLMQGTLQEKMEKNGRQIVRKLNDDRHYTAADGSEISLHGRSLLFIRNVGHLMTIPVIWDSEGNEIPEGILDGVMTGAIALYDLKVQKNSRTGSVYIVKPKMHGPQEVAFANKLFTRIETMLGMAPNTLKMGIMDEERRTSLNLRSCIAQARNRVAFINTGFLDRTGDEMHSVMEAGPMLRKNQMKSTPWIKAYERNNVLSGLFCGLRGKAQIGKGMWAMPDLMADMYSQKGDQLRAGANTAWVPSPTAATLHALHYHQTNVQSVQANIAQTEFNAEFEPLLDDLLTIPVAENANWSAQEIQQELDNNVQGILGYVVRWVEQGIGCSKVPDIHNVALMEDRATLRISSQHIANWLRHGILTKEQVQASLENMAKVVDQQNAGDPAYRPMAGNFANSCAFKAASDLIFLGVKQPNGYTEPLLHAWRLREKESH

SEQ ID NO: 70 - protein, 434 aa, Escherichia coli
MKTRTQQIEELQKEWTQPRWEGITRPYSAEDVVKLRGSVNPECTLAQLGAAKMWRLLHGESKKGYINSLGALTGGQALQQAKAGIEAVYLSGWQVAADANLAASMYPDQSLYPANSVPAVVERINNTFRRADQIQWSAGIEPGDPRYVDYFLPIVADAEAGFGGVLNAFELMKAMIEAGAAAVHFEDQLASVKKCGHMGGKVLVPTQEAIQKLVAARLAADVTGVPTLLVARTDADAADLITSDCDPYDSEFITGERTSEGFFRTHAGIEQAISRGLAYAPYADLVWCETSTPDLELARRFAQAIHAKYPGKLLAYNCSPSFNWQKNLDDKTIASFQQQLSDMGYKFQFITLAGIHSMWFNMFDLANAYAQGEGMKHYVEKVQQPEFAAAKDGYTFVSHQQEVGTGYFDKVTTIIQGGTSSVTALTGSTEESQF

SEQ ID NO: 71 - protein, 312 aa, Escherichia coli
MKVAVLGAAGGIGQALALLLKTQLPSGSELSLYDIAPVTPGVAVDLSHIPTAVKIKGFSGEDATPALEGADVVLISAGVARKPGMDRSDLFNVNAGIVKNLVQQVAKTCPKACIGIITNPVNTTVAIAAEVLKKAGVYDKNKLFGVTTLDIIRSNTFVAELKGKQPGEVEVPVIGGHSGVTILPLLSQVPGVSFTEQEVADLTKRIQNAGTEVVEAKAGGGSATLSMGQAAARFGLSLVRALQGEQGVVECAYVEGDGQYARFFSQPLLLGKNGVEERKSIGTLSAFEQNALEGMLDTLKKDIALGEEFVNK

SEQ ID NO: 72 - protein, 1178 aa, Saccharomyces cerevisiae
MSQRKFAGLRDNFNLLGEKNKILVANRGEIPIRIFRTAHELSMQTVAIYSHEDRLSTHKQKADEAYVIGEVGQYTPVGAYLAIDEIISIAQKHQVDFIHPGYGFLSENSEFADKVVKAGITWIGPPAEVIDSVGDKVSARNLAAKANVPTVPGTPGPIETVEEALDFVNEYGYPVIIKAAFGGGGRGMRVVREGDDVADAFQRATSEARTAFGNGTCFVERFLDKPKHIEVQLLADNHGNVVHLFERDCSVQRRHQKVVEVAPAKTLPREVRDAILTDAVKLAKECGYRNAGTAEFLVDNQNRHYFIEINPRIQVEHTITEEITGIDIVAAQIQIAAGASLPQLGLFQDKITTRGFAIQCRITTEDPAKNFQPDTGRIEVYRSAGGNGVRLDGGNAYAGTIISPHYDSMLVKCSCSGSTYEIVRRKMIRALIEFRIRGVKTNIPFLLTLLTNPVFIEGTYWTTFIDDTPQLFQMVSSQNRAQKLLHYLADVAVNGSSIKGQIGLPKLKSNPSVPHLHDAQGNVINVTKSAPPSGWRQVLLEKGPAEFARQVRQFNGTLLMDTTWRDAHQSLLATRVRTHDLATIAPTTAHALAGRFALECWGGATFDVAMRFLHEDPWERLRKLRSLVPNIPFQMLLRGANGVAYSSLPDNAIDHFVKQAKDNGVDIFRVFDALNDLEQLKVGVDAVKKAGGVVEATVCFSGDMLQPGKKYNLDYYLEIAEKIVQMGTHILGIKDMAGTMKPAAAKLLIGSLRAKYPDLPIHVHTHDSAGTAVASMTACALAGADVVDVAINSMSGLTSQPSINALLASLEGNIDTGINVEHVRELDAYWAEMRLLYSCFEADLKGPDPEVYQHEIPGGQLTNLLFQAQQLGLGEQWAETKRAYREANYLLGDIVKVTPTSKVVGDLAQFMVSNKLTSDDVRRLANSLDFPDSVMDFFEGLIGQPYGGFPEPFRSDVLRNKRRKLTCRPGLELEPFDLEKIREDLQNRFGDVDECDVASYNMYPRVYEDFQKMRETYGDLSVLPTRSFLSPLETDEEIEVVIEQGKTLIIKLQAVGDLNKKTGEREVYFDLNGEMRKIRVADRSQKVETVTKSKADMHDPLHIGAPMAGVIVEVKVHKGSLIKKGQPVAVLSAMKMEMIISSPSDGQVKEVFVSDGENVDSSDLLVLLEDQVPVETKA

SEQ ID NO: 73 - protein, 540 aa, Escherichia coli
MRVNNGLTPQELEAYGISDVHDIVYNPSYDLLYQEELDPSLTGYERGVLTNLGAVAVDTGIFTGRSPKDKYIVRDDTTRDTFWWADKGKGKNDNKPLSPETWQHLKGLVTRQLSGKRLFVVDAFCGANPDTRLSVRFITEVAWQAHFVKNMFIRPSDEELAGFKPDFIVMNGAKCTNPQWKEQGLNSENFVAFNLTERMQLIGGTWYGGEMKKGMFSMMNYLLPLKGIASMHCSANVGEKGDVAVFFGLSGTGKTTLSTDPKRRLIGDDEHGWDDDGVFNFEGGCYAKTIKLSKEAEPEIYNAIRRDALLENVTVREDGTIDFDDGSKTENTRVSYPIYHIDNIVKPVSKAGHATKVIFLTADAFGVLPPVSRLTADQTQYHFLSGFTAKLAGTERGITEPTPTFSACFGAAFLSLHPTQYAEVLVKRMQAAGAQAYLVNTGWNGTGKRISIKDTRAIIDAILNGSLDNAETFTLPMFNLAIPTELPGVDTKILDPRNTYASPEQWQEKAETLAKLFIDNFDKYTDTPAGAALVAAGPKL

SEQ ID NO: 74 - protein, 332 aa, Escherichia coli
MKTLGEFIVEKQHEFSHATGELTALLSAIKLGAKIIHRDINKAGLVDILGASGAENVQGEVQQKLDLFANEKLKAALKARDIVAGIASEEEDEIVVFEGCEHAKYVVLMDPLDGSSNIDVNVSVGTIFSIYRRVTPVGTPVTEEDFLQPGNKQVAAGYVVYGSSTMLVYTTGCGVHAFTYDPSLGVFCLCQERMRFPEKGKTYSINEGNYIKFPNGVKKYIKFCQEEDKSTNRPYTSRYIGSLVADFHRNLLKGGIYLYPSTASHPDGKLRLLYECNPMAFLAEQAGGKASDGKERILDIIPETLHQRRSFFVGNDHMVEDVERFIREFPDA

SEQ ID NO: 75 - protein, 246 aa, Saccharomyces cerevisiae
MAEFSADLCLFDLDGTIVSTTVAAEKAWTKLCYEYGVDPSELFKHSHGARTQEVLRRFFPKLDDTDNKGVLALEKDIAHSYLDTVSLIPGAENLLLSLDVDTETQKKLPERKWAIVTSGSPYLAFSWFETILKNVGKPKVFITGFDVKNGKPDPEGYSRARDLLRQDLQLTGKQDLKYVVFEDAPVGIKAGKAMGAITVGITSSYDKSVLFDAGADYVVCDLTQVSVVKNNENGIVIQVNNPLTRA

SEQ ID NO: 76 - protein, 246 aa, Saccharomyces cerevisiae
MPQFSVDLCLFDLDGTIVSTTTAAESAWKKLCRQHGVDPVELFKHSHGARSQEMMKKFFPKLDNTDNKGVLALEKDMADNYLDTVSLIPGAENLLLSLDVDTETQKKLPERKWAIVTSGSPYLAFSWFETILKNVGKPKVFITGFDVKNGKPDPEGYSRARDLLRQDLQLTGKQDLKYVVFEDAPVGIKAGKAMGAITVGITSSYDKSVLFDAGADYVVCDLTQVSVVKNNENGIVIQVNNPLTRD

SEQ ID NO: 77 - protein, 1171 aa, Moorella thermoacetica
MPKQTLDGNTAAAHVAYAMSEVATIYPITPSSPMAEIADEWAAHGRKNIFGKTLQVAEMQSEAGAAGAVHGSLAAGALTTTFTASQGLLLMIPNMYKIAGELLPCVFHVAARALSTHALSIFGDHADVMAARQTGFAMLSSASVQEVMDLALVAHLATLKARVPFVHFFDGFRTSHEVQKIDVIEYEDMAKLVDWDAIRAFRQRALNPEHPHQRGTAQNPDIYFQSREAANPYYLATPGIVAQVMEQVAGLTGRHYHLFDYAGAPDAERVIVSMGSSCEVIEETVNYLVEKGEKVGLIKVRLFRPFSAEHFLKVLPASVKRIAVLDRTKEPGSLGEPLYEDVQTVLAEHGKNILVVGGRYGLGSKEFNPSMVKAVFDNLAATTPKNKFTVGITDDVTHTSLEIKEHIDTSPKGTFRCKFFGLGSDGTVGANKNSIKIIGDHTDMYAQGYFVYDSKKSGGVTISHLRFGKQPIQSAYLIDQADLIACHNPSYVGRYNLLEGIKPGGIFLLNSTWSAEEMDSRLPADMKRTIATKKLKFYNIDAVKIAQEIGLGSRINVIMQTAFFKIANVIPVDEAIKYIKDSIVKTYGKKGDKILNMNFAAVDRALEALEEIKYPASWADAVDEAAATVTEEPEFIQKVLRPINALKGDELPVSTFTPDGVFPVGTTKYEKRGIAVNIPQWQPENCIQCNQCSLVCPHAAIRPYLAKPADLAGAPETFVTKDAIGKEAAGLKFRIQVSPLDCTGCGNCADVCPAKVKALTMVPLEEVTAVEEANYNFAEQLPEVKVNFNPATVKGSQFRQPLLEFSGACAGCGETPYVKLVTQLFGDRMIIANATGCSSIWGGSAPACPYTVNRQGHGPAWASSLFEDNAEFGYGMALAVAKRQDELATAISKALEAPVSAAFKAACEGWLAGKDDADRSREYGDRIKALLPGEISQASGEVKDLLLDIDRQKDYLTKKSIWIIGGDGWAYDIGYGGLDHVLASGANVNVLVLDTEVYSNTGGQSSKATQTGAVARFAAGGKFTKKKDLGLMAMSYGYVYVASVAMGASHSQLMKALIEAEKYDGPSLIIAYAPCINHGINMTYSQREAKKAVEAGYWPLYRYNPQLAQEGKNPFILDYKTPTASFRDFLMGEIRYTSLKKQFPEKAEQLFAKAEADAKARLEQYKKLAEG

SEQ ID NO: 78 - protein, 360 aa, Saccharomyces cerevisiae; identical to SEQ ID NO: 50

SEQ ID NO: 79 - protein, 369 aa, Saccharomyces cerevisiae; identical to SEQ ID NO: 51

SEQ ID NO: 80 - protein, 312 aa, Escherichia coli; identical to SEQ ID NO: 71

SEQ ID NO: 81 - protein, 126 aa, Rhodobacter capsulatus
MQDALTHGMLREYLPILVLLAMAIGLGLILIAAAAIIAYRNPDPEKVSAYECGFNAFDDARMKFDVRFYLVSILFIIFDLEVAFLFPWAVAFGDMSMTAFWSMMVFLSVLTVGFAYEWKKGALEWA

SEQ ID NO: 82 - protein, 177 aa, Rhodobacter capsulatus
MGVMTGSNTAAVDMDVAAAALNRDLQDKGFLLTTAEDIINWARNGSLHWMTFGLACCAVEMMHTAMPRYDVERYGFAPRASPRQSDVMIVAGTLTNKMAPALRKVYDQMPEPRYVISMGSCANGGGYYHYSYSVVRGCDRIVPVDIYVPGCPPSAEALMYGILQLQRKIRRTGTLVR

SEQ ID NO: 83 - protein, 199 aa, Rhodobacter capsulatus
MSEKLQDLAAHVAQQRPGDVISAEVVQGELTVTVKPEGIADFVRFLRDDAGCRFTTLVDLTAVDWPERVERFEMVWHFLSMWKNQRIRVKAGLAEDAMCPSIVEVYPAANWYEREVFDMFGILFSGHPDLRRLLTDYGFRGHPLRKDFPTTGYIELRYDEVQKRVVYEPVKLAQEYRQFDFLSPWEGAQSVLPGDEKRS

SEQ ID NO: 84 - protein, 413 aa, Rhodobacter capsulatus
MDGDIRHNSYDDGSEDVLTGEQSIRNFNINFGPQHPAAHGVLRMVLELDGEIVERADPHIGLLHRGTEKLMESRTYLQNTPYFDRLDYVAPMNQEHAWCLAIEKLTGTAVPRRASIIRVLFSEIGRILNHLLNVTTQAMDVGALTPPLWGFEEREKLMIFYERACGARLHANYFRPGGVHQDLPPDLIDDIEIWAKAFPQVLDDIEGLLTENRIFKQRNADICIITEAEIEKWGYSGVMVRGSGLAWDLRRAQPYECYDEFDFKVAVGKNGDCYDRYLVRMAEMRESTKIILQACAKLRAPDGQGDILARGKLTPPKRAEMKTSMEALIHHFKLYTEGFKVPAGEVYAAVEAPKGEFGVYLVADGTNKPYRAKIRAPGYAHLQSIDAVAKGHQLADVSAIIGTMDVVFGEIDR

SEQ ID NO: 85 - protein, 389 aa, Rhodobacter capsulatus
MLRRLHATQPDSFAFTPANRAWAEAQITKYPEGRQASAVIPLLFRAQEQEGWLTKPAIEYVADLLDMPYIRVLEVASFYFMFQLQPTGSVAHIQVCGTTSCMIMGSENLIEVCKRKISHHPHALSADGKFSWEEVECLGACANAPMAQIGKDYFEDLTEAGLERLIDDLAAGKAPVPGSEIGRFGAEPATGLTSCTTTSGAREAQNGSVARAVAVGDGTRRIDGTEVRLSAPWQVSGQMGAIGLMTARPRSAVQQQAAAEAAKAAAAAESAGGTSTPAAPVAGAAGKAAQTAETAAQKPLALVAPRDGKADELQKIESIGPALEALLHDLGIFHFDQIAAWGAGEIAWMDGNLKGFPGRASGDRWVVQAKIIVEEGLDRFLERAKTNNY

SEQ ID NO: 86 - protein, 431 aa, Rhodobacter capsulatus
MLNDHDRIFTNIYGMHDRSLKGAMARGHWDGTAAILGNGRDWIIEQVKASGLRGRGGAGFPTGLKWSFMPKQSDGRPSFLVINADESEPGTCKDREIMRHDPHTLIEGALIAGFAMGARAAYIYIRGEYVREKEALQAAIDECYEAGLIGKNACRSDYDFDVYLHHGAGAYICGEETALLESLEGKKGMPRMKPPFPAGSGLYGCPTTVNNVESIAVVPTILRRGGAWFAGIGRPNNTGVKLFAMSGHVNTPCVVEEAMSISMKELIEKHGGGVRGGWKNLKAVIPGGASCPVIPAHLCEDAIMDYDGMREKQSSFGTACLIVMDQQTDIIKAIARLSKFFKHESCGQCTPCREGTSWMWRVMERLVTGEAEVEEIDMLFSVTKQVEGHTICALGDAAAWPIQGLIRHYREEIEDRIKARKTGRMGAMAAE

SEQ ID NO: 87 - protein, 665 aa, Rhodobacter capsulatus
MSTLRKIIIDGIEVEVDPSLTLIQACEQAGIEVPRFCYHERLSIAGNCRMCLVEVVGGPPKPTASCAMQIKDLRPGPNGEPSVIKTNSPMVKKAREGVMEFLLINHPLDCPICDQGGECDLQDQAMAYGGSVSRFREVKRTSDNLNLGPLVKTEMTRCISCTRCVRFTTEVAGITQMGQTGRGADSEITSYLDMTLDSNLQGNIIDLCPVGALTSKPYAFTARPWELVKTESIDVMDALGSNIRIDAKGREVKRIVPRNHDGVNEEWLSDKGRFIWDGLRRQRLDTPYIREAGKLRKASWSEALTAAAAAMTGKKVLGLIGDLCSTEAAYSLKTLIEAQGGSVECRTDGARLPIGNRSAYVGNVAIQDIDDAKEIILIGTDPRTEAPVLNARIRKAWAKGAVVRLIGPAVDLTYDYDHVGTDRAALAGLKAGKDAIVILGQGAISEADGDAVIANAMSLSGRMLMLHTAASRVGAMDVGAVTNGGLIAALEGVQVIYNMGADEVEIAPRSEGGPIVIYQGSHGDRGASRADIILPGAAYTEEHGLFVNTEGRPQLAFRATFAPGEAKENWAILRALSAELGATLPWDSLGGLRQSMLAKHPHLGDIDHLADNGWTVPERRDMGKASFRLALGDYYFTNPIARASVVMAECSAQAKGRKSPAVAAE

SEQ ID NO: 88 - protein, 345 aa, Rhodobacter capsulatus
MADFWATSLGQTLILLAQGLGIIAFVMIGLLLLVWGDRKIWAAVQMRKGPNVVGAFGLLQSVADAAKYVFKEIVVPAGVDKPVYFLAPMLSLVLALLAWVVVPFNEGWVMADINVAVLFVFAVSSLEVYGVIMGGWASNSKYPFLGSLRSAAQMISYEVSMGLIIVGVIISTGSMNLSAIVEAQRGDFGLLNWYWLPHLPMVALFFISALAETNRPPFDLPEAESELVAGFMVEYSSTPYLLFMAGEYIAVWLMCALTSVLFFGGWLSPIPGVPDGVLWMVAKMAAVFFVFAMVKAIVPRYRYDQLMRIGWKVFLPLSLAWVVVVAFLAKFEVLGGFWARWSIGA

SEQ ID NO: 89 - protein, 163 aa, Rhodobacter capsulatus
MAFDYVRAAKYFVLWDFIKGFALGMKYFVAPKPTLNYPHEKGPLSPRFRGEHALRRYPSGEERCIACKLCEAICPAQAITIDAEPRDDGSRRTTRYDIDMTKCIYCGYCQEACPVDAIVEGPNFEYATETREELFYTKEKLLENGARWEAEIARNIEMDAPYR

SEQ ID NO: 90 - protein, 202 aa, Rhodobacter capsulatus
MTVFVFAFYLFAVVAVVAGLMVVLSKNPVHAVLWLILTFLSAAGLFVLMGAEFVAMLLIIVYVGAVAVLFLFVVMMLDIDFAALRGQLVRYAPVGGLIALVMLAQLATGLMVWNTADAANGLRAAPAPEGVENTAALGMILYDRYLYLFQGAGLVLLVAMIGAILLTLRHRTDIKRQNVLAQMHRDPAKALEMVDVKPGQGL

SEQ ID NO: 91 - protein, 102 aa, Rhodobacter capsulatus
MTIGLEHYLAVAAILFVTGIFGIFVNRKNVIVILMSIELMLLAVNINMVAFSTHLGDLVGQVFTMFVLTVAAAEAAIGLAILVVFFRNRGTIAVEDVNVMKG

SEQ ID NO: 92 - protein, 712 aa, Rhodobacter capsulatus
MTTIILLAPLLGALIGGFGWRLITEKGALVVTTGLLFLSCILSWVVFLTLPAETQHIHLLDWIRSGALDTSWGIRLDRLTAIMLIVVTTVSALVHLYSWGYMAHDENWTHHEAYKARFFAYLSFFTFAMLMLVTSDNLVQMFFGWEGVGVASYLLIGFYYKKPSANAAAIKAFVVNRVGDFGFALGIMGLFFLTDSIDMDVIFASAPELAKTELHFLAWEFNAANLLAVLLFIGAMGKSAQLFLHTWLPDAMEGPTPVSALIHAATMVTAGVFLVCRMSPLFEYAPEAKMMVVYVGAVTAFFAATVGLVQNDIKRVIAYSTCSQLGYMFVAAGSGVYSVAMFHLLTHAFFKAMLFLGAGSVIHAMHHEQDMRNYGGLRKKIPFTFAIMMIGTLAITGVGIPFFSIGGVPVGFAGYLSKDAIIESAFASGNGFAFYVLVAAAGMTSFYSWRLIFLTFYGEARGDHHKHDHAHESPAVMLAPLALLAVGSVLAGMVWYHSFFGDKVASFFNLPAAAHGEAHGTEHATEGHVPEAAMTAEAAHEAAMAGTMAMAEPAAEHAVAKAPQGAIFMAETNHVIHDAHGVPDWVKLSPFGAMVTGFFFAWLYYIGDKPLPGRTARALPGLYRFLLNKWYFDELFDLLFVNPAKSLGRKLWKGGDGAVIDGAINGLALGWIPFFTRVAGRIQSGYLFHYAFAMVLGIVALMFWVVRTGGMN

SEQ ID NO: 93 - protein, 512 aa, Rhodobacter capsulatus
MQNLLSIITFLPLAAAAVLAVVSRGSGPAADRNAKWVALTATVVTFLVSLLLLAGFDPANPGMQFVEDRAWIMGLHYKLGVDGISILFVMLTTFLMPLTIASAWHVETRVKEYMIAFLVLEALMIGVFVALDLVLFYLFFEAGLIPMFLIIGIWGGKERIYAAFKFFLYTFLGSVLMLVAMVAMYMMAGTTDIVTLMSFDFPHADLPFLGWWTLTGGVQTLLFLAFFASFAVKMPMWPVHTWLPDAHVQAPTAGSVVLAAVLLKMGGYGFLRFSLPMFPVGAETMTTFVFILSAVAIVYTSLVALAQEDMKKLIAYSSVAHMGYVTMGIFAANQQGVDGAIFQMLSHGFISGALFLCVGVIYDRMHTREIAAYGGLVNRMPAYALIFMFFTMANVGLPGTSGFVGEFLTLLGIFQVNTWVALFATSGVILSAAYALWLYRRVVFGELVKESLKTISDMTTREKAIFAPLVAMTLLLGVYPSLVTDLIGPSVAHLVQNYHADLGTLAQATAGN

SEQ ID NO: 94 - protein, 478 aa, Rhodobacter capsulatus
MTKAEFSLVLPEVLLAIYAMGVLLFGVWTGKDRVAKPILWASAVTMLALALIIGLGTGNDTAFGGLFIADGFARFSKVVILVSAAAVLAMSSDYMGRRGLLRFEYPILIVLAVVGMMMMVSAGDLMSLYIGLELQSLALYVVAALRRDSAVSSEAGLKYFVLGSLSSGLLLYGASLVYGFAGTTTFSGIITVVEQGHLPIGLLFGLVFLLAGLAFKVSAVPFHMWTPDVYEGSPTPVTAFFATAPKLAAMALIARVVHDAFGQVPGEWGQILAALALASMYLGAIAGIGQRDIKRLMAYSSISHMGFGLLGLAAGTAAGVESMLLYMTIYIVMNVGTFAFILSMERDGKPVTEIAALNMLSKTDPVKAFALLVLLFSLAGVPPMLGFFAKFAVIKAAIGAGFVWVPVAAVVASVIGAFYYLRIVYFMYFGEKSAPLDGRMPALQFAFLVLAAVAMLGGAINMAGVEGAAQAAAASLVN

SEQ ID NO: 95 - protein, 491 aa, Escherichia coli
MAVTQTAQACDLVIFGAKGDLARRKLLPSLYQLEKAGQLNPDTRIIGVGRADWDKAAYTKVVREALETFMKETIDEGLWDTLSARLDFCNLDVNDTAAFSRLGAMLDQKNRITINYFAMPPSTFGAICKGLGEAKLNAKPARVVMEKPLGTSLATSQEINDQVGEYFEECQVYRIDHYLGKETVLNLLALRFANSLFVNNWDNRTIDHVEITVAEEVGIEGRWGYFDKAGQMRDMIQNHLLQILCMIAMSPPSDLSADSIRDEKVKVLKSLRRIDRSNVREKTVRGQYTAGFAQGKKVPGYLEEEGANKSSNTETFVAIRVDIDNWRWAGVPFYLRTGKRLPTKCSEVVVYFKTPELNLFKESWQDLPQNKLTIRLQPDEGVDIQVLNKVPGLDHKHNLQITKLDLSYSETFNQTHLADAYERLLLETMRGIQALFVRRDEVEEAWKWVDSITEAWAMDNDAPKPYQAGTWGPVASVAMITRDGRSWNEFE

SEQ ID NO: 96 - protein, 331 aa, Escherichia coli
MKQTVYIASPESQQIHVWNLNHEGALTLTQVVDVPGQVQPMVVSPDKRYLYVGVRPEFRVLAYRIAPDDGALTFAAESALPGSPTHISTDHQGQFVFVGSYNAGNVSVTRLEDGLPVGVVDVVEGLDGCHSANISPDNRTLWVPALKQDRICLFTVSDDGHLVAQDPAEVTTVEGAGPRHMVFHPNEQYAYCVNELNSSVDVWELKDPHGNIECVQTLDMMPENFSDTRWAADIHITPDGRHLYACDRTASLITVFSVSEDGSVLSKEGFQPTETQPRGFNVDHSGKYLIAAGQKSHHISVYEIVGEQGLLHEKGRYAVGQGPMWVVVNAH

SEQ ID NO: 97 - protein, 468 aa, Escherichia coli
MSKQQIGVVGMAVMGRNLALNIESRGYTVSIFNRSREKTEEVIAENPGKKLVPYYTVKEFVESLETPRRILLMVKAGAGTDAAIDSLKPYLDKGDIIIDGGNTFFQDTIRRNRELSAEGFNFIGTGVSGGEEGALKGPSIMPGGQKEAYELVAPILTKIAAVAEDGEPCVTYIGADGAGHYVKMVHNGIEYGDMQLIAEAYSLLKGGLNLTNEELAQTFTEWNNGELSSYLIDITKDIFTKKDEDGNYLVDVILDEAANKGTGKWTSQSALDLGEPLSLITESVFARYISSLKDQRVAASKVLSGPQAQPAGDKAEFIEKVRRALYLGKIVSYAQGFSQLRAASEEYNWDLNYGEIAKIFRAGCIIRAQFLQKITDAYAENPQIANLLLAPYFKQIADDYQQALRDVVAYAVQNGIPVPTFSAAVAYYDSYRAAVLPANLIQAQRDYFGAHTYKRIDKEGVFHTEWLD

SEQ ID NO: 98 - protein, 416 aa, Escherichia coli
MESKVVVPAQGKKITLQNGKLNVPENPIIPYIEGDGIGVDVTPAMLKVVDAAVEKAYKGERKISWMEIYTGEKSTQVYGQDVWLPAETLDLIREYRVAIKGPLTTPVGGGIRSLNVALRQELDLYICLRPVRYYQGTPSPVKHPELTDMVIFRENSEDIYAGIEWKADSADAEKVIKFLREEMGVKKIRFPEHCGIGIKPCSEEGTKRLVRAAIEYAIANDRDSVTLVHKGNIMKFTEGAFKDWGYQLAREEFGGELIDGGPWLKVKNPNTGKEIVIKDVIADAFLQQILLRPAEYDVIACMNLNGDYISDALAAQVGGIGIAPGANIGDECALFEATHGTAPKYAGQDKVNPGSIILSAEMMLRHMGWTEAADLIVKGMEGAINAKTVTYDFERLMDGAKLLKCSEFGDAIIENM

SEQ ID NO: 99 - protein, 759 aa, Escherichia coli
MDDQLKQSALDFHEFPVPGKIQVSPTKPLATQRDLALAYSPGVAAPCLEIEKDPLKAYKYTARGNLVAVISNGTAVLGLGNIGALAGKPVMEGKGVLFKKFAGIDVFDIEVDELDPDKFIEVVAALEPTFGGINLEDIKAPECFYIEQKLRERMNIPVFHDDQHGTAIISTAAILNGLRVVEKNISDVRMVVSGAGAAAIACMNLLVALGLQKHNIVVCDSKGVIYQGREPNMAETKAAYAVVDDGKRTLDDVIEGADIFLGCSGPKVLTQEMVKKMARAPMILALANPEPEILPPLAKEVRPDAIICTGRSDYPNQVNNVLCFPFIFRGALDVGATAINEEMKLAAVRAIAELAHAEQSEVVASAYGDQDLSFGPEYIIPKPFDPRLIVKIAPAVAKAAMESGVATRPIADFDVYIDKLTEFVYKTNLFMKPIFSQARKAPKRVVLPEGEEARVLHATQELVTLGLAKPILIGRPNVIEMRIQKLGLQIKAGVDFEIVNNESDPRFKEYWTEYFQIMKRRGVTQEQAQRALISNPTVIGAIMVQRGEADAMICGTVGDYHEHFSVVKNVFGYRDGVHTAGAMNALLLPSGNTFIADTYVNDEPDAEELAEITLMAAETVRRFGIEPRVALLSHSNFGSSDCPSSSKMRQALELVRERAPELMIDGEMHGDAALVEAIRNDRMPDSSLKGSANILVMPNMEAARISYNLLRVSSSEGVTVGPVLMGVAKPVHVLTPIASVRRIVNMVALAVVEAQTQPL

SEQ ID NO: 100 - protein, 466 aa, Escherichia coli
MPHSYDYDAIVIGSGPGGEGAAMGLVKQGARVAVIERYQNVGGGCTHWGTIPSKALRHAVSRIIEFNQNPLYSDHSRLLRSSFADILNHADNVINQQTRMRQGFYERNHCEILQGNARFVDEHTLALDCPDGSVETLTAEKFVIACGSRPYHPTDVDFTHPRIYDSDSILSMHHEPRHVLIYGAGVIGCEYASIFRGMDVKVDLINTRDRLLAFLDQEMSDSLSYHFWNSGVVIRHNEEYEKIEGCDDGVIMHLKSGKKLKADCLLYANGRTGNTDSLALQNIGLETDSRGQLKVNSMYQTAQPHVYAVGDVIGYPSLASAAYDQGRIAAQALVKGEATAHLIEDIPTGIYTIPEISSVGKTEQQLTAMKVPYEVGRAQFKHLARAQIVGMNVGTLKILFHRETKEILGIHCFGERAAEIIHIGQAIMEQKGGGNTIEYFVNTTFNYPTMAEAYRVAALNGLNRLF

SEQ ID NO: 101 - protein, 510 aa, Escherichia coli
MRIGIPRERLTNETRVAATPKTVEQLLKLGFTVAVESGAGQLASFDDKAFVQAGAEIVEGNSVWQSEIILKVNAPLDDEIALLNPGTTLVSFIWPAQNPELMQKLAERNVTVMAMDSVPRISRAQSLDALSSMANIAGYRAIVEAAHEFGRFFTGQITAAGKVPPAKVMVIGAGVAGLAAIGAANSLGAIVRAFDTRPEVKEQVQSMGAEFLELDFKEEAGSGDGYAKVMSDAFIKAEMELFAAQAKEVDIIVTTALIPGKPAPKLITREMVDSMKAGSVIVDLAAQNGGNCEYTVPGEIFTTENGVKVIGYTDLPGRLPTQSSQLYGTNLVNLLKLLCKEKDGNITVDFDDVVIRGVTVIRAGEITWPAPPIQVSAQPQAAQKAAPEVKTEEKCTCSPWRKYALMALAIILFGWMASVAPKEFLGHFTVFALACVVGYYVVWNVSHALHTPLMSVTNAISGIIVVGALLQIGQGGWVSFLSFIAVLIASINIFGGFTVTQRMLKMFRKN

SEQ ID NO: 102 - protein, 462 aa, Escherichia coli
MSGGLVTAAYIVAAILFIFSLAGLSKHETSRQGNNFGIAGMAIALIATIFGPDTGNVGWILLAMVIGGAIGIRLAKKVEMTEMPELVAILHSFVGLAAVLVGFNSYLHHDAGMAPILVNIHLTEVFLGIFIGAVTFTGSVVAFGKLCGKISSKPLMLPNRHKMNLAALVVSFLLLIVFVRTDSVGLQVLALLIMTAIALVFGWHLVASIGGADMPVVVSMLNSYSGWAAAAAGFMLSNDLLIVTGALVGSSGAILSYIMCKAMNRSFISVIAGGFGTDGSSTGDDQEVGEHREITAEETAELLKNSHSVIITPGYGMAVAQAQYPVAEITEKLRARGINVRFGIHPVAGRLPGHMNVLLAEAKVPYDIVLEMDEINDDFADTDTVLVIGANDTVNPAAQDDPKSPIAGMPVLEVWKAQNVIVFKRSMNTGYAGVQNPLFFKENTHMLFGDAKASVDAILKAL

SEQ ID NO: 103 - protein, 313 aa, Leptosphaeria maculans
MIVDQFEEVLMKTSQLFPLPTATQSAQPTHVAPVPTVLPDTPIYETVGDSGSKTLWVVFVLMLIASAAFTALSWKIPVNRRLYHVITTIITLTAALSYFAMATGHGVALNKIVIRTQHDHVPDTYETVYRQVYYARYIDWAITTPLLLLDLGLLAGMSGAHIFMAIVADLIMVLTGLFAAFGSEGTPQKWGWYTIACIAYIFVVWHLVLNGGANARVKGEKLRSFFVAIGAYTLILWTAYPIVWGLADGARKIGVDGEIIAYAVLDVLAKGVFGAWLLVTHANLRESDVELNGFWANGLNREGAIRIGEDDGA

SEQ ID NO: 104 - protein, 532 aa, Rhodococcus erythropolis
MSAFLDAVVVGSGHNALVSAAYLAREGWSVEVLEKDTVLGGAVSTVERFPGYKVDRGSSAHLMIRHSGIIEELGLGAHGLRYIDCDPWAFAPPAPGTDGPGIVFHRDLDATCQSIERACGTKDADAYRRFVAVWSERSRHVMKAFSTPPTGSNLIGAFGGLATARGNSELSRQFLAPGDALLDEYFDSEALKAALAWFGAQSGPPMSEPGTAPMVGFAALMHVLPPGRAVGGSGALSAALASRMAVDGATVALGDGVTSIRRNSNHWTVTTESGREVHARKVIAGCHILTTLDLLGNGGFDRTTLDHWRRKIRVGPGIGAVLRLATSALPSYRGDATTRESTSGLQLLVSDRAHLRTAHGAALAGELPPRPAVLGMSFSGIDPTIAPAGRHQVTLWSQWQPYRLSGHRDWASVAEAEADRIVGEMEAFAPGFTDSVLDRFIQTPRDIESELGMIGGNVMHVEMSLDQMMLWRPLPELSGHRVPGADGLYLTGASTHPGGGVSGASGRSAARIALSDSRRGKASQWMRRSSRS

SEQ ID NO: 105 - protein, 392 aa, Chlorobium tepidum
MNIHEYQGKGILKQFGVAVPKGIVAFSAEEAKQAAEQLFEEQSSPVVVVKAQIHAGGRGKAGGVKLAKSPEEVFEIAQKMLGATLVTHQTGPEGKEVRRLLIEEGMNIDKEFYLGITLDRTTSSNVLMVSTEGGMEIEKVAEETPEKLLKIHVDPVYGLQGFQARKAAFFLGLQGEQFRNGVKFIEALYNAYTTIDASLAEINPLVITKEGRVLALDAKINFDDNALYRHSDFHDLRDITEEDPLEYEASKSNLNYVRLDGNVGCMVNGAGLAMGTMDLIQLSGGRPANFLDVGGGASSKTVEEGFKIILGDKNVKAILVNIFGGIVRCDRVAGGIIEAAKNIGLKVPVIVRLEGTNATEAQKMLDESGLNLISAKGLRDAAEKVQKALATA

SEQ ID NO: 106 - protein, 300 aa, Chlorobium tepidum
MSVLVNKDTRLVVQGITGGEGTFHTSQILEYGTNVVAGVTPGKGGILYNGNEKDQFCRPVPVFDTVQEAVDKAEANATVIFVPAPFAADAIMEAAAAGLKVIICITEGIPVNDMMKAYSYVQAKGAVLVGPNCPGVITPGEAKVGIMPGFIHKKGTIGVVSRSGTLTYEAVHQLTEVGLGQSTCIGIGGDPIIGTRFLDAVKLFAKDDETEGLVMIGEIGGSAEEEAAEYIKKYFKKPVVGFIAGRTAPPGRRMGHAGAIVSGGKGTAEEKIKAMEAAGIKVVENPADIGEAMLKALGRA

SEQ ID NO: 107 - protein, 627 aa, Chlorobium limicola
MSDTTILNREDMVTAKNSVSVLFAGDSGDGMQLTGTQFANTVAVYGSDLNTFPNFPSEIRPPAGTVAGVSGFQLQFGTSSVYTPGAKFDVMIAMNAAALKANLKNLHHGGIIITDTDGFDAKNLKLSGYGEENNPLRDGTLKDYTVFEIPVVSLTRTALAETGLSTKNIDRCKNMFVLGVLYWLYSLPLETTIKTLKTKFAKKLDLAEANIKAVTAGYNFGDETEMFSQHGRFSVAPADKKPGLYRRVTGNEASAIGLAAAAKKAGLNLFLGSYPITPATEILQTLAGLKKWGVKTFQAEDEIAGVLSSIGAAYGGALAATNTSGPGLALKSEGLGLAVILEIPLVIINVMRGGPSTGLPTKPEQSDLLMAMYGRHGDAPMPVIAAKSPVDCFYAAYEAAKIAVEYMTPVLCLTDGYLALSSEPMLVPSPDELASITPVFSPARKADDPPYLPYKRDDRAVRPWAKPGTPGLEHRIGGLEKQHETGNVSHDPANHELMTKLRAEKVARVADIIPDLTIDNGPENGDVLVLGWGSTYGAIKKAVEQALEGGCSVAHAHLRYINPFPKNLGEVMGHYKKVLIPENNCGQLLSMIRDKFLIEPVGFSKVQGLPFNEMEIEAKITDILKEL

SEQ ID NO: 108 - protein, 342 aa, Chlorobium limicola
MTDTLAQLTAKDFTSNQEPKWCPGCGDFAVLQQLKNAMADLGLKTEEVVVVSGIGCSSRLPYYIATYGVHGIHGRALAMASGLKTARPELSVWVGTGDGDALSIGGNHYIHTVRRNLDLNVILFNNEIYGLTKGQYSPTSKVGLRTVTSPNGVVDHPINTAALTLGAGGTFFARVMDRDGKIMRDIFKRAAEHKGTSLVEIYQNCPIFNDGAFDPFTDKDRKADTTLYLEQGKPLIFGKNNDKGIRLDGFTPVIVDLGDPSVSQDDLWIHDEKDFIKANMLARFFDDPDASEDFLPRPFGIFYVEDRYTYESALSAQIEKAQENGEGTLEELLAGSNTWTIG

SEQ ID NO: 109 - protein, 569 aa, Chlorobium limicola
MRIMSDFSMVFEGAAGQGVQTITRMLLPVLKNCGHHVFACTEFMSRIRGGSNTTEIRVTEKSRQAYVRRIDMLFALSPKAHEHLDRRIDGDTLVFAESEQCAFPSKGNCIATPVKALALEAGSPVFSNTVVVGMVLGLLGIPLEELDALLHDRFHEKGEEIVLKNITAATLGYDWGRNCPEAGNIDLPHCDSDGSPAKLLMDGTSALGIGAIAAGCNFISSYPMSPSTGLLTFLAEKSDAFGVVVDQAEDEIAAINAGLGASYAGARAVVTTSGGGFDLMQEGVSLAGMLELPIVIHIGQRPGPATGLPTRTEQGDFNLVLHAGHGEFARAIFAPGTLEELMHLAQRAFAVAHRFHIPVFLLTDQFLLDAETIVEAAAIQRFPVEEAIVETGEEYLPYRFTEDGLSPRGVPGYGAGLVRADSDEHSEAGFITEDFDVRRRMVEKRLARLGPLSEEALMPTVTGLIDNARTLVVGWGSNRGVIEEALDLFGDPHVAGLHFSQLYPLNPAVASLLGDRKLIVLENNPTGQFAAYLAIETGKNIAGRILKATGEPFSVEEVVEALRKEVGHE

SEQ ID NO: 110 - protein, 287 aa, Chlorobium limicola
MSDTQTRFDMPPHTDVAWCPGCGNHMLLTAVKGALDDLGIDPRQLVMVSGIGQAAKAPQYINANMFNGLHGRALPAALGIRLSNRNLVVVVESGDGDMYGEGGNHFLHAIRRNFDVTMIIHNNMVYGLTKGQASPTSPIGMRTPVQVKGVIPEPFNPLAVAIALDAPFVARAFAGDIAQTRSLIAEAIRFRGCSIVDVFQPCVIFNKLNTYQWFREHTCSMPEDHNPEDRIAAFALAIQHEPLPLGIFYRNGTRALYEDQAGITETPLYRQPPPGEEAFEKLIDAYR

SEQ ID NO: 111 - protein, 474 aa, Synechococcus sp.
MAQFEKLTAPSQGTPIRFENGQPVVADNPIIPFIRGDGTGVDIWPATQKVLDAAVAKAYGGVKTIEWFKVYAGDEACDLYGTYQYLPEDTLEAIRTYGVAIKGPLTTPVGGGIRSLNVALRQIFDLYSCVRPCRYYEGTPSPHKRPQDLDVIVYRENTEDIYMGVEWEADDAVGQELRKHLNEVVIPANGKLGKRQIPEGSGIGIKPVSKHGSQRHIRKAIQHALRLEGNKRHVTLVHKGNIMKFTEGAFRDWGYELATTEFRDVCITERESWILGNLEKDSGLSVQANARMIEPGYDSLTPEKKADIDAEVQAVIDAIGSSHGGGKWRSMVLVDDRIADSIFQQIQTRPQEYSILATLNLNGDYISDAAAAMVGGLGMAPGANIGETAAIFEATHGTAPKHAGLDRINPGSVILSGVMMLEFLGWQEAADLVTKGLSAAITDKQITYDLARLMEPQVDPVSCSGFAEAIIQRF

SEQ ID NO: 112 - protein, 856 aa, Aquifex aeolicus
MSVDKSKALVLWLDEVTIEDIPIAGGKNASLGEMIRNLSPLGVKIPYGYVVTANAYYYFLDYNNLRDKIRKILEGLNTDDLKDLQRRGHEVRELIRGGTFPPDLEEAIKDYYNKLSEKYKTHAVDVAVRSSATAEDLPDASFAGQQETYLNVVGAENVLVAIKNCFASLFTDRAIVYRERFGFDHFKVGIAVGVQKMVRSDMGASGVMFTLDTETGFKDVVVINAAYGLGELLVRGEVTPDEYIVFKPTLMKGYSAIIEKKLGRKDRKMIYGTGDERVKIVNVPKEDQKKFALNDDEILQLAKWGVLIEEHYSKKNGRWTPMDIEWAKDGILNELFVVQARPETVHSRKKENVVKIYKIKTPEEERKNRVIVKGIAVGDKIATGKARVLFDLKEADQFQEGEILVTDITDPDWEPVMKKAAAIVTNRGGRTSHAAIVARELGIPAVVGTGNATEKIKTGEEITVSCAEGETGYVYEGKIDYEVEEINLENIPKPKTKIMMNIGNPESAFRYASLPNDGVGLAREEFIIANYIKIHPLALLHYEDLKELYEKLERENLIDEKGFVQFKLIYHYANGRLANKLAKGKDKLRVNLRKILQDIENLTFGYEDKATYYIKKLSYGIAKIAAAFYPNPVIVRFSDFKSNEYANLIGGILFEPEEENPMLGWRGASRYYSDVFKEAFGMECKAIIRVRNKMGLTNTKVMIPFCRTPEEGEKVLQVMEEYGLRKGENGLEVYVMAELPSNIVLADRYAQIFDGFSIGSNDLTQLTLGLDRDSELVAHLYDERNEAVKRLIAQLIKTAKEYGRKVGICGQAPSDFPEFAQFLVEQGIDSISLNPDSVLKTMLAVVEMEKKLGVLK

SEQ ID NO: 113 - protein, 556 aa, Streptococcus mutans
MKTDIEIAQSVDLRPITNVVKKLGIDFDDLELYGKYKAKLTFDKIKAVEENAPGKLVLVTAINPTPAGEGKSTITIGLADALNKIGKKTMIAIREPSLGPVMGIKGGAAGGGYAQVLPMEDINLHFTGDMHAITTANNALSALIDNHLHQGNELGIDQRRIIWKRVVDLNDRALRHVTVGLGSPINGIPREDGFDITVASEIMAILCLATNVEDLKERLANIVIGYRFDRSPVYVRDLEVQGALALILKEAIKPNLVQTIYGTPAFVHGGPFANIAHGCNSVLATSTALRLADYTITEAGFGADLGAEKFLDIKAPNLPTSPDAVVIVATIRALKMNGGVAKDALNQENVEAVKAGFANLARHVENMRKYGVPVVVAINEFITDTNDEIAVLRNLCAAIDVPVELASVWANGADGGVDLANTLINTIENNPSHYKRLYDNNLSVEEKVTEIAKEIYRADKVIFEKKAKTQIAQIVKNGWDNLPICMAKTQYSFSDDPKLLGAPTGFDITIRELVPKLGAGFIVALTGDVMTMPGLPKKPAALNMDVAADGTALGLF

SEQ ID NO: 114 - protein, 556 aa, Clostridium perfringens
MKNDIEIAQSAKMEPIINIAKKIGLGEDDIELYGKYKCKISLDAIKKLENNKDGKLVLVTAINPTPAGEGKSTVTVGLGQALNKIGKNTVIALREPSLGPVFGIKGGAAGGGYAQVVPMEDINLHFTGDMHAITSANNLLCAAIDNHIHQGNLLRIDSRRIVFKRVMDMNDRALRNIVVGMGGKINGFLREDGFMITVASEIMAILCMASDLEDLKERMGNILIAYNLDGEPVYAKELEVQGAMALLMKDAIKPNLVQTLENTPAIIHGGPFANIAHGCNSIIATKTALKMSDITITEAGFGADLGAEKFLDIKCRYGNLNPDCVVLVATIRALKHHGGVKKDELNISNVDALNKGMKNLEKQIENIKAYGVPVVVAINKFITDSDEEVKAIEDFCKNIGVEVSLTEVWEKGGEGGIDLANKVIKTMETEPSNFKMIYDSEESIKDKILKIVQTIYGGKGVNYTPQALKQIAEIEKFNLDKLPICMAKTQYSLSDNPSLLGRPENFDITVKEVRVSNGAGFIVVLTGDVMTMPGLPKVPAANRMDIKDNGEIVGLF

SEQ ID NO: 115 - protein, 280 aa, Moorella thermoacetica
MPAQILDGKKIAAEVRAEVKEEVSRLKAEGINPGLAVVLVGEDPASQVYVRNKHRACEEVGIYSEVHRLPAATSQAELLKLIDQLNKDPKIHGILVQLPLPDHIDEKKVIDAIALEKDVDGFSPANVGNLVIGDKCFYPCTPHGCMVLLEKAGIDPKGKKAVVVGRSNIVGKPVAMMLLARHATVTICHSRTRDLAAECRQADILIAAVGKPELITGDMIKEGAVVIDVGINRVGEKKLVGDVHFESAAQKAGWITPVPGGVGPMTIAMLLKNTVEAARR

SEQ ID NO: 116 - protein, 261 aa, Clostridium tetani
MKNFIDERVEKGLKVPCVSSILIGNDKGSLFYIKNQRRICKEIGIEFKNIVLEENIEEDKIIEVIEDLNKDENVHGIILQMPLPKTLDEEKIVNKICPSKDIDGLTDINAGRFYKGEKCFIPCTAQGIIEIIKSTKESISGKKAVVLGRSVIVGKPVAQLLVNEDATVTICHSKTKDIKSLCKEADIIVSAMGIPKFVKEDFIKDGAIVIDVGFSVLDGKMVGDIDYDNVFKKAGFITPVPGGVGSVTPTMLIKNLCEVFK

SEQ ID NO: 117 - protein, 277 aa, Clostridium perfringens
MDKILSGKTVAIDIKGQIKSYTEELKASGKSLKISSILVGDDGGSVYYQNFQEKLANNLGIDFEKIKLDESISEENLKLKIEELNKDDSVNGIMLLLPLPKHIDERAVTNLIDADKDLDCLSEVSVGRFYKGEKCFMPCTPNSVITLLKAYNIEIEGKEVVIIGRSNIVGKPLFQMFLNENATVTVCHSRTKNLKEVCKRADILVVAIGRANFIDSSYVREGAVVIDVGTSEVNGKITGDVNFDDVYDKASLITPVPGGVGSLTTTLLLKNVCKELD

SEQ ID NO: 118 - protein, 292 aa, Haemophilus influenzae
MSYAKEIDTLNQHIADFNKKINVSFEFFPPKNEKMETLLWDSIHRLKVLKPKFVSVTYGANSGERDRTHGIVKAIKQETGLEAAPHLTGIDATPEELKQIARDYWDSGIRRIVALRGDEPKGYAKKPFYASDLVELLRSVADFDISVAAYPEVHPEAKSAQADLINLKRKIDAGANHVITQFFFDIENYLRFRDRCASIGIDTEIVPGILPVTNFKQLQKMASFTNVKIPAWLVKAYDGLDNDPTTRNLVAASVAMDMVKILSREGVNDFHFYTLNRSELTYAICHMLGVRP

SEQ ID NO: 119 - protein, 296 aa, Salmonella typhimurium
MSFFHANQREALNQSLAEVQGQINVSFEFFPPRTSEMEQTLWNSIDRLSSLKPKFVSVTYGANSGERDRTHSVIKGIKERTGLEAAPHLTCIDPTRDELRTIARDYWNNGIRHIVALRGDLPPGSGKPEMYAADLVGLLKEVADFDISVAAYPEVHPEAKSAQADLLNLKRKVDAGANRAITQFFFDVESYLRFRDRCVSAGIDVEIIPGILPVSNFKQAKKFADMTNVRIPSWMSLMFEGLDNDAETRKLVGANIAMDMVKILSREGVKDFHFYTLNRAEMSYAICHTLGVRPGL

SEQ ID NO: 120 - protein, 263 aa, Carboxydothermus hydrogenoformans
MFIMIGERINGMFKDIREAILNKDPRPIQEWARRQAEKGAHYLDVNTGPTADDPVRVMEWLVKTIQEVVDLPCCLDSTNPDAIEAGLKVHRGHAMINSTSADQWKMDIFFPMAKKYEAAIIGLTMNEKGVPKDANDRSQLAMELVANADAHGIPMTELYIDPLILPVNVAQEHAVEVLETIRQIKLMANPAPRTVLGLSNVSQKCPDRPLINRTYLVMAMTAGLDAAIMDVDDDALVDAAATAHILLNKEIYCDSYLKTFRQK

SEQ ID NO: 121 - protein, 732 aa, Carboxydothermus hydrogenoformans
MSEVINFDQIFEGAIEPGKEPKRLFKEVYEGAITATSYAEILLSRAIEKYGPDHPVGYPDTAYFLPVIRAFSGEEVRTLKDMVPILNRMRAQIKSELTFENARLAGEATWYAAEIIEALRYLKHTPENPIVVPPWTGFIGDPVVRQYGIKMVDWTIPGEAIIIGRAKDSKAAKKIVDDLMGKGLMLFLCDEIIEQLLEENVKLGVDYIAYPLGNFTQVVHAANYALRAGLMFGGIAPGLRDAHRDYQRRRVLAFVLYLGEHDMVKTAAAMGAIFTGFPVITDQPLPEDKQIKDWFISEPDYDKIVQTALEVRGIKITSIDIDLPINFGPAFEGESIRKGDMHVEFGGGKTPSFELVRMVGPDEIEDGKVEVIGPDIDSVEPGGRLPIGIVVDIYGRKMQEDFEPVLERRIHYFTNYGEGFWHTAQRDLTWVRISKEAFAKGARLKHLGQLLYAKFKQEFPSIVDRVQVTIYTDEQKVLELREIARKKYAERDARLRELSDEAVDTYYSCLLCQSFAPTHVCIVSPERVGLCGAISWLDAKAAYEINPNGPNQPIPKEGLIDPVKGQWESFNEYIYKNSQRTIERMNLYTIMEYPMTSCGCFEAIMAYLPELNGFMIVNREHSGMTPIGMTFSTLAGMVGGGTQTPGFMGIGKSYIGSRKFVKADGGLARVVWMPKDLKEQLRSIIEERAEEEGLGRDFIDKIADETVGTTVDEVLPFLEEKGHPALSMEPLL

SEQ ID NO: 122 - protein, 511 aa, Deinococcus radiodurans
MPDYDLIVMGAGHNALVTAAYAARAGLKVGVFERRHLVGGAVSTEEVVPGYRFDYGGSAHILIRMTPIVRELELTRHGLHYLEVDPMFHASDGETPWFIHRDAGRTIRELDEKFPGQGDAYGRFLDDWTPFARAVADLFNSAPGPLDLGKMVMRSGQGKDWNEQLPRILRPYGDVAREYFSEERVRAPLTWMAAQSGPPPSDPLSAPFLLWHPLYHEGGVARPKGGSGGLTKALRRATEAEGGEVFTDAPVKEILVKDGKAQGIRLESGETYTARAVVSGVHILTTANALPAEYVPSAARNVRVGNGFGMILRLALSEKVKYRHHTEPDSRIGLGLLIKNERQIMQGYGEYLAGQPTTDPPLVAMSFSAVDDSLAPPNGDVLWLWAQYYPFELATGSWETRTAEARENILRAFEHYAPGTRDTIVGELVQTPQWLETNLGLHRGNVMHLEMSFDQMFSFRPWLKASQYRWPGVQGLYLTGASTHPGGGIMGASGRNAARVIVKDLTRRRWK

SEQ ID NO: 123 - DNA, 774 bp, Unknown
  source: /note="Description of Unknown Sequence: Uncultured marine bacterium"
atgtcaataattaagtctttaaagtcagtcgctattgcatcactggctattctcattccatcaattgcattagcagctggtggaaacttggagccgaacgatcctgtcggcattaccttttggttgatatcgatcgcaatggtcgccgctaccgtatttttcttgatggaatcattgagagttgacggcaagtggagaacatcaatgattgtgggcggacttgttacactagtagctgcggtccactacttttatatgcgtgatgtttgggttgccacaggtgcatcgcccacggtctttcgttatgtagattggctaatcacagtgcctctgcagatgattgaattctaccttattttagctgcttgcactgccattgctgtcggcgtcttctggcgcctcatgatcggcacaatggtaatgttaattggcggatatctaggtgaggcgggcttcatcaacgctacggttggtttcgtgatcggaatggccggttggggatatatattgtatgaaatctttgctggtgaagctggcaaggttgctgcagaaggtgcgcccccatctgtacaatcagctttcaacacaatgcgtctgattgtgactattggttgggctatttatccacttggatatttctttggctacatgaccggaggagttgacgcaaattcgctgaacctgatctacaacgttgctgacgttgttaacaagattggtttctgtttagcaatttgggctgctgctacttcacaatctgaagcggcaaagtaa

SEQ ID NO: 124 - DNA, 777 bp, Unknown
  source: /note="Description of Unknown Sequence: Uncultured marine bacterium"
atgaaactctcaatgggtaaggtgatgaagactgcgatgatcgcaggcggactcgccactctcccaactgtcgcaaacgctgctacggcgatgcttgctgcaactgactatgtaggcatctcgttctggaccatttcgatggccatgatggcagccgcaatcttcttcctgatggaagcaggtcgcctgcctggcaagtggaagaccgcaatgacgattggtgcactcgtgcagatcgttgcagcggtacactatttctacatgcgcgacgtatgggtcagcactggtgaaacgccaaccgtttacaggtatgttgactggttgatcactgttccgctccagatggtagaattctacttcatcctggcagcggtggccgttgttagcgctggtatgttctggcgcttgatgatcggttcgctggtaatgctggttgctggttaccttggtgaagcaggccttgtgaatgcatggctcggttttgtcgtaggtatggccggatgggcatacatcctctacgagatctttgctggtgaagctggcaaggtgtccgcagagtccgcgccggaggctgttcagaagtcgttcagcacgatgcgtatgatcgtgaccgtcggctgggcaatttatccgctcggctacttcctcggttacctgaacggtgctgctgacgctgtcaccttgaacgttatctacaacgtcgctgacgttgtaaacaagatcgcgttcgttggtgtgatctgggcagctgccaacgcagaagccgcgaaagcctaa

SEQ ID NO: 125 - DNA, 786 bp, Unknown
  source: /note="Description of Unknown Sequence: Uncultured marine bacterium"
atgaaactcttctcgggtaaagccacgaaaacggcgctgattgcggcggcgttggctatcacacccaaagttgcgtttgctgcagaaaaccttgcgagtgacgacttcgtcggcatttcgttctggttgatctcgatggcgctggtcgcttcgaccgcgttcttcttcatcgaaacgcagcgcgtggaaggtaagtggaagacttcgcttaccgtgtccggtctcgtgaccctggtcgcagccgtgcactacttctacatgcgtgatgtatgggtcaacactggcgcaacaccgacagtctatcgttacatcgactggctgatcactgttccgcttctcatgatcgagttctatctgatcctgcgcgccatcgccaacgtctcgtctggcattttctggcgtctgacggtcggtactctgatcatgcttgtcggcggttacgccggcgaagtgggctacatgaatgtgtggctcggctttgtaatcggtatggccggttggttctacatcctgtacgagatctttgctggtgaagccggcaagctttctgcagagcaggcaccagagtcggtcaagtcggcattctccaccatgcgttggattgtaaccatcggctgggcgatctatccgctcggctacttctacggttaccttgcaaccggtgatccggctagctccgctgactcgctcaacgtgatctacaacctggctgacgtgctgaacaaaattgcgttcggtgtgatcatctggaacgttgcggtcaccgagaccgaggcgaaggcctaa

SEQ ID NO: 126 - DNA, 765 bp, Unknown
  source: /note="Description of Unknown Sequence: Uncultured marine bacterium"
atgggtacggcactgaaagcctcgctggttgcagctgggctcgccactctcccatccgttgcaaacgctgcgacgacgatgcttgctgctacagattatgtaggcatctcgttctggaccatttcgatggccatgatggcagctgcgatcttcttccttatggaagccggtcgtctgccgggcaagtggaagacagccatgacgattggtgcactcgtgcagatcgttgccgctgtgcactatttctacatgcgcgacgtgtgggtcaccaccggtgatacgccgacagtttacaggtatgtcgactggctgatcaccgttccgcttcaaatggtggaattctacttcatcctggcggcagtcgccgcagtcagcgccggcatcttctggcgtctgatgatcggctcgctggtcatgcttgtggctggttacctcggtgaggcaggccttgtgaatgcatggctcggcttcgtcgtcggtatggcaggatgggcttacattctgtacgaaatcttcgctggtgaagctggcaaggtatctgccgaatccgcgcccgaggcggtgcaaaagtccttcggtacgatgcgtatgatcgtgaccgtgggttgggcgatctatccgctcggctacttccttggttacctgaacggtgctgctgatgcagttaccctgaacgttatctacaacgtcgccgacgttgtgaacaagatcgcgttcgtcggtgtgatctgggcagccgcaaacgcggaagcttccaaagcctaa

SEQ ID NO: 127 - DNA, 768 bp, Candidatus Pelagibacter ubique
atgaaaaaactaaaattgtttgctcttacagctgtagccctaatgggtgtttcaggtgtagcaaacgcagaaactacactgttagcttctgatgactttgttggaatttcattctggcttgtgtcaatggcgttattagcgtcaacggcattcttttttattgaaagagcatcggttccagctggctggagagtttcaatcactgttgcaggactagttactggtattgcatttattcactacatgtacatgagagatgtgtgggttatgactggtgagtcaccaacagtatacagatatattgactggttaattacagttccattattgatgttagaattctattttgttcttgcagcagtaaataaagcaaactctggaattttctggagattgatgattggtactttagtaatgttaatcggtggatacttaggagaagcaggatacatcaacactacacttggttttgtaatcggtatggctggatggttctacattctttatgaagtattctcaggcgaagcaggaaaaaatgcagcgaaaagtggaaacaaggctcttgttactgcatttggtgcaatgagaatgatcgttacagttggttgggctatctacccattaggttatgtatttggttacatgactggtggaatggacgcaagctcactaaacgtgatttacaacgcagctgactttttgaacaagatcgcttttggtctaatcatttgggcagcagcaatgtctcaacctggtagagctaagtag

SEQ ID NO: 128 - DNA, 885 bp, Salinibacter ruber
atggtggggtacctcatcggaatggtggccctcaacctgccccacggcggctacgaacactttgcgaacctgcgccaccgccgcgtctccttcagtctgcggtacatcgtgttgtacctcgccttcctcgtcggcttcgtgggcttcttcttcgtggcgcccgtcgtggcgctcggcctagccttctccacggcggtcatcaagggtgggcacggcgggctgaaggtgatggacgccctgtgcgggaccgagcacctgcagtcgtcgtggcagcgcggcctggcggccttcgtgcggggcggtgccgtcatgctggtgccactgctggcctggcccggcgtctacgtgacgttctccacctacatggtgcacatcttcggcgcggcaggccccctgccgctggccacgcgcctcgcggacgttcaggtggcggtgggtacggtctacggcctcgccctcgtggcccacctcggtggggggctgtacgccggggggctgtcgagggcgtggctcacggatgcggccgagaccacgctcctggtcgtctacttcacgttcgtccccatgatgctggcggtgggcctctacttcccgctctggtacaccctgcgccagaccgcccgcaccacggccgtcgcgtccgacgccccggcgccggaccggttgtcgcttcccctcacctgggcggcgatggtcctgggggcgctcgtcacgttcgggctcatggccggcttctacgtgctcgtcccgaatccgctgggcggcgccggactgctcggcggggcggtggccttctacaccattttcgtctgtcttctggcgctgccccacatcgtcgtgggcgagtggctggacccggcgcggggcatctggtacgtgccgtag

SEQ ID NO: 129 - DNA, 1026 bp, Unknown
  source: /note="Description of Unknown Sequence: Uncultured marine bacterium"
atgactgacctgtctacaccctcgaaacatgcatttgtcgagcagggttccgggctttccatttcgaagtccacttccgagattattcacgatttcatccttgaaagaatgcctgcccccgggcagacgctcgccgacgcggctatgcatcatttcgctgccccgggcaagatgctccgcgcaaagatggcgctccgtgctgccgaccttctcaaggtcgaccggccggcggcccttcactgggcggcggcgatcgaggttctccacaacgcgtcacttgtccatgatgacatttgcgacggcgaccagttgcgccgcggacgtccggccgtctggtcgaaattcggacgcgatgtcgcgctcaccctcggcgactggcttattgccctatctttcgagctcgccgcagaggccgcgcaacgcgcgcagacgccgatgctgctgaagattcttgccacccatatgaagacaaccactgtcggcgaggcgcacgaattcgacccggcgccggttaccgactgggatcattacctgcagggtgccggtgacaagaccgcgccgctgctgaccgcgcctctcgaggggatcgccgccatggccctccatggtggcgccgctccgacgatcggtgcctgcttccgctcgcttggcaatgcctatcagatcggcaacgacatcctgaatttctcgggaagcgacggtgccaatacctgcgggtcggacatggctcgccgtgccccgaacggcgttgtcgtccttttccgccagacactggatgcagaccgtcttgccgcattcgacagctggtatgccagcggctcggatgacggattcgatgcgtggctcgcagagctgcggcgctcgcccgccctgttcgaggcggcgcggcggatgaatgcgatgctcgacgacgcgacgggtcttgccgacacgctgccgcccgaaatggcagcggtgatcacgcctatacagcagcttctgcagcaggtatgtctgaagtctgtggcttcgatcaaacaggcctga

SEQ ID NO: 130 - DNA, 1017 bp, Unknown
  source: /note="Description of Unknown Sequence: Uncultured marine bacterium"
atgacagagaacatagccagccaagtcaatgagatgcagggcgcagaaaagcttgatgctcttcctgatttgtctgctgtactgtcagcctttattgtgcggagattgccatcgggcaaacacccactcgccactgctgctcaacatcatttcaaacgtactggcaaacagttgcgtggccgtatggctctagccgctggagacagttttggcgtaccacgaacggccagcctaccctgggctgcagctgtggaagttcttcataatgcttcactggtgcacgacgatatctgtgatggagatatggtgcgccgtggcgcgccgtctgtctgggcattttatgggcgcgatacggcactggcgcttggtgactggctaattgcgctctcctttgagctggcagcagaagctgcctatctcgggcagacgccacagctggtttctatcctgtcacgccacatggccgccaccacggcaggacaagctctcgagtttgaggttcgcgcctacccagactggtctggctatatggacatcagcacaggcaaaactgcccctttatttattgcatcggttgaagggattgctcacctggccggccgccgtgatgcaatacggccgctgaaccggtttttcagtgctgcaggcggttgttatcaaattgccaatgatatgttgaatgtgattggtaaggatggcgcggaaagcccggcatccgacctgctgcgtcgcgccccgaacgcggtgattgtgatgtttcagacaacattggataagcatacagcgacagcctttgacaagtggctgtcctcaggcgacacacatggtgcgcttacctggcaggaacatgtgcgccggtcaccagcgctgaccatgacttcatcagccttgctgagcatgctggaagaagcagaagcatcatcggctgcctttcccacagattgccgggcaatcatcacaccaatattggcacagcttcggcatgtctgccgcgatcttaccagtttaaatgcctaa

SEQ ID NO: 131 - DNA, 1035 bp, Unknown
  source: /note="Description of Unknown Sequence: Uncultured marine bacterium"
atggggccgatgaccaacctctccacaccatcgaacgaaatcctccgagacgccagaaacggcgcggccatttcgccttcgacttcggaaatcatccatgacttcattatcgagcgtatgccgcaggcgggtcagcccctggccgaggctgcagcgcatcacttcgcctcgcctggcaagatgctgcgtgcgaagatggcgctcagcgccgccgacctgctgaaggtcgacaggcctgcagccctgcactgggcggcagccatcgaggttctccataacgcctcgctgatccatgacgacatctgtgatggcgacaggttgcgccgcggccgtccggcggtgtggtcgcagttcggacgggatgtcgcgctgacccttggcgactggcttgtggcgctgtccttcgagcttgccgcagaggcggcacagcgcgcgcagaccccgatgctggtgaagatcctggccacacatatgaagaccaccacccttggtgaggcgcgcgaattcgatctgcagccggtgaccgactggcaacattaccttcagggcgccggtgacaagacagcaccgctgctgaccgcgccgatcgagggggtggcgacgatggcgcttcatggcggtgcggcaccaacgatcggtgcctgtttccgggcgcttggaaatgcctatcagatcggcaatgacattctgaatttctctggtcgcgacggcgccgacacctgcgggtcggaccttggcaggcgtgccccgaacggtgttgtcgtgctgttccgcgattacctcgacgattcgcgccgtgcggatttcgacgactggtatcgcagcggcagtgacgacgggtttgaagactggctcgccgcgcttcgtacgtcgcgggccccggccgaggctgcgcggcggatgaacatgatgctggatgatgccagccgcctgtccgaatccctgccggccgaactgtccgccgtgatcaggcctatacagcagcttctccagcaggtatgtctgaagtcagtggcatctttgaaacagggctga

SEQ ID NO: 132 - DNA, 1026 bp, Unknown
  source: /note="Description of Unknown Sequence: Uncultured marine bacterium"
atgactgacctgtccacttctgcgaaagacatattttcaaagtccggaacgggcttgccggcttcgcaatccactgccgagatcattcacggtttcatcatcgagcgcatgccgaagatcggcgagccgctctccgaggcggcactccaccacttcgcatcgcctggcaagatgcttcgcgcgaaaatggcgctccgcgctgccgatcacctgaatgtggaccgctacgcggcgctccactgggcggcggcgatagaggtcctgcacaatgcctcgctgatccatgacgatatctgtgatggtgacaggctgcgccgcgagaggccggccgtgtggtccgtctatggccgcgacgtggcgctgacgcttggtgactggcttgtcgctctgtcgttcgagcttgccgccgaagctgcccagcgcgcgcagacgccgatgctggtcaagatccttgcgacgcacatgaagaccacaaccgacggcgaggcgcgcgaattcgacgttcagcctgtccgtgactgggaccattacctgaagggggccggcgacaagacggcaccgctcctgacggcacctctcgagggtgtcgcggcaatggcgcttcatggcggctcggccccgatcatcggcgactgcttccgcgcgctcggcaacgcctaccagattgccaacgacattctcaacttctcgggtggcgacggggcgaatacctgcggttccgacctcggccgccgtgcaccgaacggtgtcgtcgtcctgttccggcagcagcttgacgcacagggccagtccaaattcgacgactggtatgcctgcggtgcgagtgaaggcctcgaagcctgggttgatgaactgcgtgcttccggcgcgccggccgaagcggcacggcggatggaaagccttcttggcgacgccacggcatacgcgggacggctgccaaccgaactcagcgccgtcatcacgcctatacagcaactgcttcaacaggtatgtctgaaatctgtggcctcgctgaacaaaggctaa

SEQ ID NO: 133 - DNA, 720 bp, Pyrobaculum arsenaticum
atgaatctctatgagtatctctcacaaggcattaagcactttacgttaatagaccccgacaaatctgtcgattatctcagaattgcaaggtacgcattggaggcgggaacagacggcatcctagtaggcggctccctcggaattacggcgagccaaatggagaaagtagtaaaagatatcaaaagtgttgcaaatgtacctgtggttcttttcccgggctctctgtcgcaattaaccgacgcggcggatggggtgttattcctcagcgtattgaattcccttgacccctatttcataataggtgcacaggttcacggcgcggttctcatagctaagcactatcctcggctagaagtaatatctacggcgtatgtgatagtaggcgacggcggcgccgccggctttgtttctatgagcaagccaattccctacactaggccggacatcgcaacggcgtacgcccttgctgcaggatacatagggtttaaagccctctacctagaggcggggagcggggcgccgcaacctgtgccgcccgacatggtaagagctgtgaggaaagcctttccacgggtgctcatagtaggcggggggataaggagtagcgaggtggcgaggagcatagcccgcgaggggcctaacgtgatcgtaacggggactcttgccgaggagtcgccggaaaaactcggcgaaatagtgcgcgcaattaagcaacgctag

SEQ ID NO: 134 - DNA, 924 bp, Thermosynechococcus elongatus
atgatttccgctgatcccccccaagtccatcccgccggcacatttgatctcaaggcctacctcaaagaacgccaagcccttgtggaagctgcccttgaagcctcgattccggtggcctatccggagaaaatttacgatgcgatgcgctattcactgatggcggggggcaagcggctgcgcccgattctctgtttggccacctgtgaactgatggggggcaccgtggaaatggccatgccgactgcctgtgccttggagatgatccatacgatgtcgctcatccacgatgatctaccggccatggacaatgacgactaccgtcgcggcaagcccaccaatcacaaggtctatggtgaagatattgccattctggcgggggatggcttactggcctatgcctttgagtatgtggtggaacaaaccaagaatgtacccgcggagtatctgttgaaaattgtggcgcggttggggcatgcggtggcagcaacgggcttagtcggtggtcaagtggtggacttagagtgtgaaggacagcccgacattggtctggaaacgctgcattttatccactcccacaaaacgggggccctactggaggcctctgtggtgtctggggcattgctgacgggggcgcatgaatctgacgtggcacgcctgtcccgttatgcggcaaatattggcttggcattccagattgtggatgacattttggatattacttcgacccgcgatgtcctcggtaaaaccgttggtaaagatgtggctgcccaaaaaatgacctacccgcgcctgtggggtctggaaaaatctcgccaagaggctgagcgcttggtggcggaggcgaaggcagagttggctgtatatggggcggccgctgttcctttgcaggcgatcgccgactacattaccagccgtagtcattaa

SEQ ID NO: 135 - DNA, 1038 bp, Picrophilus torridus
atgaaagaatacagtatacatttatcatcattaaaggataaaatagaaaaagagctaaaaaactttttcgagaaaaagctggatgcatgtgacgacgaaaacataaggtatgtaataaaggagctaatggaattcacaatgaatggcggtaagcgattgaggccgataatgatgataaccggctactcgctattcaatgatatcgatgataatataataaaggcatcgatatcaatagagcttgcacaatcatatttattaatacatgatgatataatggatcaaagcgacatgcgccgcggaaggccaagctttcacagatccgtggagacaagactaaatgatccaaggaactcaatgaacatagcaatagttgcaggagatcttatagattcattttcacatgaggcactgctaacatctggttttgatataaaaaatcttatatctgctgattatgaattttcaaaggttattgaggataccggaaaggggcagctgatagacatcttttcatcacttgacgatgaattttctgaatcaaggttaatgaagctgcattatatgaagactgcaaggtacacaattgaagggccattggtgatgggcgccatgcttgcaggaaataaaaaggacatcgattatttaagaatctatggtaagaacataggcatagcatttcagataaaggatgatattctcggactttttggtgatgaaaaacaaacaggtaaatctataaaaagtgatgtaaacgagggcaaaaaaacccttttaatgataaaggcctatgaaagatcaaataatatgataagggattacataaaaacatgcctctcatccggcgatataagtgatatagattttaaaaagcttaaggatattgttgtttcaacaggctcatatgattactcgctaaaaatcatggaagatttaatatcaaagggcaagagcgcattgaagatggttagcggcaatgaggaatcaaaggccatgcttgaatatttatctgattatatattaaacagatcaaattaa

SEQ ID NO: 136 - DNA, 984 bp, Unknown
  source: /note="Description of Unknown Sequence: Uncultured marine bacterium"
atgtccagcccacgcgctgaacagaaacagcaagacgcacattatccagctgagagaggcacagccctaaagacactggctaaaaatggcaaaagcttttactgggcatcacgcctgctgggccgccagatggcaatagatgcagctgagctgtatagcctgtgccggcttttggatgatattgccgatggcgatatcaacgggctggatacgaaagaaggaacacatcgactccgccatatccgccgccaactgacccaaatagatgctgggaaaatacctgaacagccagacccagcacttttgcagtatatgcaggttatgaaccgatgccagatcccggttatgccacttatccatctattggacgggctgttgctggatcagtctgcaatgctgcttaaggatgaggcagatttggtggcttatgcttatcatgtagcaggcgctgtcgggcttctgatgtgtcctgttctgggctgtgacgacaggacagccttccgttttgctgtggatatgggcatcggcatgcaactaacaaatattgcccgagatattctggaagatgcccagatgggacgtcgctacctgcctgaaagctggacaggccagctctcgcctgaccagattgttgcctgtgcagaggcccctgaatcgcagaactataagcagattcaagctgccgcagacaggctgctgactcttgctgaccagtattatgaaagcgggcgtctggggctaggatttctgcctgtgcgcgcacgatattgcattgctgttgcagcaggtgtttatcgcgccattgggacaaaattaagaacccgtaagctgcggtggggcgatgggcgcgtggtaactagcaagagcgagaaactgtctgctagcctgcaggccctatccaaactctatcgcctgccaaaagctactcataacaccaatttgcatgcgcctcttaccagtttattagatgaggcacttaaatga

SEQ ID NO: 137 - DNA, 918 bp, Unknown
  source: /note="Description of Unknown Sequence: Uncultured marine bacterium"
atgtcgaacgaagagctgacatccgaaaaatcgcttgccgccaacggcaagagtttccactgggcacgccgttttctgggacagcgcatgggaagcgacgcggcctcactctatgcgttctgccggcttctcgacgatatggccgacggcgatatacagaacggtccgaccaggcttgccgccatccgtgccgatctgattgccggccgcgagggggctgatcccgcattccttgcattcctgccgctgatgcgggaaaaacgctttccaacggacgtgcttgtggcgctgatcgacgggttgctcgaggatcaggccgaagaggtggcgctcgccgacgaggccgcgttgctgcgctacgcctaccgggtggcgggaaccgtcggcctgctgatgtgccatgttctcgactgccaagcgccggcagcacgggcgcatgccatcgatctcggcatcgccatgcagctgacaaacatcgcccgcgacattctcgaggatgccggcatgaaccggcgctatgttccaggtgactgggtcggccatgcaagcccgcacgaaatccgtgccgcggcaaggtcgccggaaagcatgctggcgcgcgatgtgaccgctgcggcaggccggcttctggatcttgccgagaccttttatgccagcggggcccgggggtatcgctatctgccatggcgggcgcatctcgccatcggggtggcggcacgggtctatcggcagatcggcatccagcttcgcggtgccaaccttgcctggcatgccggaaggcaggtgaccggcaaggcggccaagctgcgatgctcgctgctggcgctgggaagttttgggcgtcggatcggcatcgggacatcgccacatgacgaccgccttcacgcagcactgcgggggctgccctatgtcgcctga

SEQ ID NO: 138 - DNA, 918 bp, Unknown
  source: /note="Description of Unknown Sequence: Uncultured marine bacterium"
atgtcgaatgaaacactgacgtccgagcaatcccttgccgccaacggcaagagcttccactgggcacggcggtttcttggtgacaggatggggcatgatgcggcccggctatatgccttctgccggcttctcgacgatatggccgacggtgacattgaagacgggccggcacgacttgccatcattcgcgaggatctgctggccggacgcggtggcgatgatccggcgtttgccgcctttttgccgctgatgcatgaaaaacagtttccgccagaggttctggtcgccctcatcgatggccttctggaagaccaggcggcggaggtggctcttgccgacgaggcggcgcttcttcgctatgcctaccgggtggcgggtacggtcgggttgctgatgtgccacgttcttgactgccactcgccggcggcgcgggcgcatgccatcgatcttggcattgcaatgcagctcaccaacatcgcccgtgatgtccttgaggatgcgcagatgggccgccgctacattccgggtgactgggtggggggcgcgacaccggacgatatccgcgccgctgcacaagacccgtccgcgccaccagccgaagcggtgacggtggcggttggcaggcttcttgaccttgccgaggcgttctacgccagtggcgccagcggctatccctttcttccctggcgggcgcatctgtccatcgctgtagcagcgcgggtctatcgccagattggtgtccagcttcgcggggccgggcttgcctggcatcaggggcgtcaggtgacaagcaaagcgacaaagcttcggtgctcgctggtggcccttgccagcttccgccggcggatcggctccggcaggacagcgcatgacccgcagcttcatacagcgctgagagggcttccctatgttgcgtga

SEQ ID NO: 139 - DNA, 921 bp, Unknown
  source: /note="Description of Unknown Sequence: Uncultured marine bacterium"
atgacgtcgaatgaacagctgacatccgagcagtctctggccgcgaacggcaagagtttccattgggcaaggcggtttctgggttcgcgcatgggaggcgatgccgcccgtctgtacgccttttgccgccttctcgacgacatggctgacggtgacatcgaaaacggtccggcccgcctgaccgcgatcagggctgacctgctggccgggcggcccggggacgacccggcgctgcgtgcgttcctgcctctgatgacggaaaagcgctttccgccggacgttctgatcgcccttatggacggtctgctggaggatcaggatgatgtcgtggtcctcgccgatgaagcggcgcttctgagatatgcctacagggtcgccggcacggtcggtctgttgatgtgccatgttcttgactgccatgcgccctcggcgcgggcgcatgccatcgatcttggcatcgcgatgcaactcaccaacatcgcgcgggatgtgctcgaggacgctcagatggaccggcggtacctgcccgggacctgggtcggtaacgccgaccccgggacgattctcgccgcggctgacgatcccgacggtttggtggcgcgagaggtaagggccgcggtcgcgagattgctgtcgcttgccgatcagttctacgcaagcggcgccgagggatatcggtatcttccctggcgggcgcatatgtccatcgccgtcgctgcaagggtctatcggcagatcggggtgcagctcgccgccgttgaattcgcctggcatgaaggtcggcaggtcacaagcaggagcacgaaacttcgttgctctgtactggcgcttgccggtctggcgggtcgtttcgggcctgcccgcggtcagcatgacggcacgctccatacggctctgcgagggctgccctatgttgcctga

SEQ ID NO: 140 - DNA, 936 bp, Thermosynechococcus elongatus
atgctgcaactgcctagagccgagtacgtccctcccctggtttccctcgacgaagcctacgagctgtgtcgtcaggtaactgccacctacgccaagaccttttacctcggcacgctgttgatgccccctgcgaagcgccgcgccatttgggcgatttacgtttggtgtcggcgcaccgatgaactggtggatggcccgcaagcagcaacgacaacactggccaccctcgatgaatgggaagctcgccttgaggatatttttagcggccgtccccatgatgctatggacttggccttgacggcgacgctggaacactatcccctcaacatccaaccctttcgggacatgattgctgggcagcggatggacttgcgccgcagtcgctatgaaacttttgccgagttggaactctattgctatcgcgtggcgggtaccgttggcttgatgtcccttgaggtcatgggaggagacccctatagcgatcgcctctgtgccccttgggtggatccctatcaggccaaagggaccctcaaggatcaggccattgcccttggcattgccaatcaactcacgaatatcctgcgggatgtgggtgaagatatgcggcgggggcgtatctatctgcccctagaggacttggctgcctttaactacactgaagaagacctacagcgcggagtgattgacgatcgctggcgggcactcatgcgctttcaaattcagcgggcacggcaattttatcgagaagcagaagtgggggttgcctaccttgagcgggatgcccgttggcctgtgtggtcagcgctgatgctctatcgccagattcttgatgtcatcgaagctaacgattacgatgtctttaatcggcgcgcctttgtttccgactggcgcaagctgctttttattcccgtttcttggctcaaggccagcttctag

SEQ ID NO: 141 - DNA, 852 bp, Picrophilus torridus
atgttcacatcaatagatcataataatagcgatttaatcgtttccgaagtattccaaaaaggaagtacaacatacttttatagcagcagatttttccctttgcatataagattaaaggtttcaagactctacgcatttgtgagagttgcagataactttgtggattcagtaccacaacaggtggataaattctataattttaaaaacgaatatgaacgtgccttgaaaagaggcttttcagatgatataattataaataaatttatagatctaaagaatgatgtgggcattgatgactcctgggttgatgcatttttaaatgccatggaatctgatataaataaaaagatctattatacagtaccagagctgctgtcttacatatatggctctgcagaggtcatagggctgatgatggcaaggatacttgatcttgataatagatcatatccatacgcaagaatgcttggaagggcaatgcagtaccttaattttataagggatttcagtgaggatctttcaatgggcagaatttatctcccgcttgaattcacagagataaatgattttagctatgagaatgtcattaaaaacattgaagcgttcaatctttttataagaaaaaaccttaatgtttacttctcatggaataaacaggcagcaaaaggctttagatatattaaatacagatatctggttccaataaagactgcatctgatatgtatctctggactggaaaaataatatacaggaatccaatgatagtatataaatcaaaggtaaagcctggaaaaagattaattaggggacgtggtatttacaatcttataggtgccttaagatggatataa

SEQ ID NO: 142 - DNA, 924 bp, Salinibacter ruber
atgtcaaccctctccctcgacacccgcgccgacgaagatgagtggatttgggagtcgttccggtaccactcccggaccttctccctggcggcgtacctcctgccgcgctccgtgcagatgtccgtcgccaccctctacctctactgccggcgggtcgactcgattgccgaccagcgcgtgttggaggtggggcgcgagcgggccctgcaggaagtaaggcaggtgcgggaccggttggacgaaacgctggcgggccgcccgcccgccgagacggtgctgtggcgtcgcctcgcggaggtgcatgaacagtcgtcccttccccggggcccgatgtacgagctcatcgaaggggccctttgggacctggaggggcgtccggtcgtctcgaaggccgacctgatcgagtactcgaacctcgtgggggggagcgtcggggccatgatgctgcccttccttgccgacccggagcgccacgacgaactagagccggcggcccggaagctcggcattgcgatgcagatcacaaacatcgtacgggacgtcggggaggacatcgacgagctggaccgggtgtatcttcccgagcactggctcgacgagcacaacgtgtcggtggaggccctccaacagggccgggtcgccgacggataccccgccctgttggaggcggccatggaggcggccgagcaacgctacgtggacagcttcgagggcgtggcggcacttccgttccgcagccggtacggcatccgggccgcggcccggatgtaccgggaaatcatgaacgaggtgcgtgccaatgactacgataacctcggtcggcgtgcgtacgtgtcgtttcgtcggaagctcttcctcctcctctatgacggctacgaacgccgcaagcaccgcctgacctcggacgctctgagtggcccctga

SEQ ID NO: 143 - DNA, 1548 bp, Unknown
  source: /note="Description of Unknown Sequence: Uncultured marine bacterium"
atggatgatgcccgcccctactcctataagaaagatatggtagagcgcgttcatagcgtggtcgtcggcagtggttttggcggaattgctgcagccttgcgtatgcgtgcaaaaggccatcaggtaacgctgatagagcggctagaagatgttggtggccgcgcgcgtgtatttgagcgtggcggctttcgccatgatgcaggcccaactgtaatcaccgccccatttttgtttgatgagctgtttgacctgtttggagagacgcgttctgaacatctgaaatttgtgccgcttgatccatggtacaggtttcatttccatgatggatctgagtttgattaccgcccgtcactagctgacacacatgcagagattgctcggttttcgccagaagatacaaaaaactatgacaggttggtgaacacgtccaaacagatttttgatgtaggttttacccaactggcagataagccgtttacccgttttacctctatgatcaagctaatcccgcaattattgcggctacgcagctatttgacagtagcccaactggtaaacagccacatcaaacaccccttattgcggcaggccttttccatccatccgttacttgtaggcggcaaccccttcgatacgacatctatttatgctttgattcattatctggagcgcaaatggggcgtgtatttttgcatgggcggtacaggcaagctggttgctgaattgaaagcacttatgatccgccagggtgttgatctgaaactgaatacagatatcattgagatttgtgtttctgacaagaaagttacaggtgtgcgcacggccgacggggcctttatttctgctgataatgtgatttgtaacgctgacccaccaactgtgtaccggcagatgctgcctagccagacccacctccgcaaaaaggtgctgccagaggcagtaacccgctattcgatgggcctgtttgtgctgttttttgggacccagcagcgctatccagacattgcccatcacacgatatggatgggaaaacggtataaggatttactgcatgatatctttagcaaaaagatattggcagaagatttttcattatatctgcatcgcccgaccgccacggacgcccgttttgcacctgagggctgtgatagtttttatgtcctctgcccggtccctaacctgcagggtgatgtggactgggcaaaacaagggccactcctgcaagacaggattgtcaccgctcttgagaaaagtattatgccagacctacgtaatgtgattaccgaagatttttatatgacacctgaagatttcaaagcagattaccgatctgaacatggtgctggcttttctatatcccccagcttcacccaatctgcctggttccggtatcataaccgtgatccgcatctggcaaatctgtatttttcaggagcaggtgcacatcccggtgctggtatgcctggcgtgctctgttcagccaaagtcgttgaaacgttggtcagcgaagatgaacggaaagccgcacatgtccagcccacgcgctga

SEQ ID NO: 144 - DNA, 1575 bp, Unknown
  source: /note="Description of Unknown Sequence: Uncultured marine bacterium"
atggcaccagccccctcggctattcaggatctggcggccccgcattccaagaccgggccagccgaccagagcgatgttcttgtaatcggtgccggttttggcggaatcgcggctgccctccgtatgcgcgcccggggctattccgtgacgcttgtcgacaggctggatgccattggtggacgggcgcaggtgtttgaacggggcggcttccggcatgatgccggcccgaccgtgatcacagctcccttcctgttcgacgagctgttcgagctgttcagagagcgccgcgagaatcatctcgacttccggccgctggacccctggtaccggttccatttccatgacggcaaccagttcgactaccgcgccacggtcgaggacaccaacgccgagatcgagcgtttctccccgcgtgacgtcgccggatatgcagggctgctggaggcatcccggcagattttcgaggtcgggttcgagaaactcgccgacaggccctttactcgtttcatgacgatgatggcgcaagtgccctcgctgttgcgccttcgcagctatcacaccgtcgccagcctggtgaaccgccatatcaaacatccactgcttcgccaggccttttcgattcatccgctgcttgtcggcggcaacccgttcacgaccacctcgatctacacgctgatccattatctggagcggcggtggggtgtgttcttctgtatgggcggcaccggcaagctcgtcgaggaactgcaccggcttcttgaacgcgccggcgtcaatgtcgagcttggcgtggatattgagcgcatcaccatgaaaggcggccgcgccaccggcgccgaatccacagctggcaggcgctatattgcggatcgggtgatctgcaatggcgatccgccgaccgtctatcagcagatgctgcccaacgagacacgctccaagcgggcaattcccgaagccgcgacaaaatattcgatgggtctttacgtgatgttctttgggacacgcaagcagtatcccgacgttgcgcatcataccatctggatgggaccgcgctatcgtgagctgcttgccgatatcttcgaccgcaagattcttgccgatgatttctcgctctatcttcaccggccgaccgccaccgacagcagcttcgcgccggacggctgcgacagtttctatgtgctgtgcccggtgccgaacctgcttggcgatgtggactgggagtttgagggaccaaggcttcgcgaccgcattgttgcggcgctggaagagacgatcatgccgggcctgggcgcgtccattaccgatgatttctggatgacgccggaagatttcaagcgcgactaccgttcgatgcatggcgccggtttctcgatcgcgccgattttcacgcaatcggcgtggttccgctaccacaaccgcgacccacatatcccgaacctgtatttttcagccgccggcgcgcacccgggagcagggatgccaggcgtcttgtgttctgctaaggttgttgagcgactgattgaggaggaagaccgggcggccgccgccagcggaaggctggcaaagggggcctga

SEQ ID NO: 145 - DNA, 1563 bp, Unknown
  source: /note="Description of Unknown Sequence: Uncultured marine bacterium"
atgaatccggccccaacggcgtcttcgtccagcgcggacacatcatcagttatcaccagcgatgttcttgtcatcggtgccggttttggcggcatcgctgcggctctcagaatgcgcgcacgtggccattcagtgacccttgtcgacaggttgcaggccattggcggccgtgcccaggtgtttgagcggggcggctatcgccatgatgccggtccgacggtcatcaccgcgcccttcctgtttgacgaattgtttgaattgtttggcgagcgccgcgaggaccatctcgatttccagccgcttgacccatggtaccggtttcatttcgacgatggcagccagtttgactatcgcgccacggtcgaggatacgaatgacgagatcaggcggttttccccgcgtgatgtcgccggctatgccaggctgttggaaacatcgcggcgaatctttgaggtcggcttcgaaaagcttgctgacaaaccctttaccagattcaccgcaatgctggcacaggtgccatcgctgctgaagcttcgcagctaccgcaccgtggccgggcttgtgaacagtcacatcaaacacccgcttttgcggcaggcgttctcgatccatccgctgctggttggcggcaacccgttcaccacgacctcgatctacgcgctgatccactatcttgagcggcgctggggcgtgtttttctgtatgggcggcaccggcaagcttgtagccgaacttcaccggcttctggagcggagcggtgtgcgggtcgaacttggtaccgatatcgcgcaaatcaccctggccggggggcgggcaactggtgccgtgtctaccgacgggcggcaatttacggccgagcgggtgatctgcaacggtgatccgccaacggtctatcagcagatgttgcctggcgagtcgcgttcgaagcgcgcgctccccgagtccgcaacaacctattcgatgggtctctacgtcctgttcttcggaacgaagcgcaaatatgaggatgtggcgcaccacaccatctggatggggccgcgctaccgcgaactcctggctgatatttttgaccggaaaattctggccgatgatttctcgctgtatcttcaccggccgaccgccaccgatgacagctttgcgcctgacggctgtgacagcttctatgtcctgtgtccggtgccgaatcttcttggtgatgtcgattggcagaaggaagggccgaaccttcgcgaccgtattgtggcggcgcttgacaagaccatcatgccggggctgtcagagtcgatcagtgatgatttctggatgacgcccgaggacttcaaggcggattatcgctcgatgcatggcgccggcttctcaatcgcaccgatttttatccagtccgcctggttccgctatcacaaccgcgatccacacatcccgaacctctatttctcggctgccggagcgcatcccggcgcggggatgccaggcgttctctgttctgctaaggttgtcgagagactgatcgaggaagaggatcaggcactggccgccagccgcagtctggcgcggtctgcctga

SEQ ID NO: 146 - DNA, 1554 bp, Unknown
  source: /note="Description of Unknown Sequence: Uncultured marine bacterium"
atgacacctgccaaacaggcacaagcagacatcgcggacaattctgccgaccgtagcgacgtacttgtcatcggcgccgggtttggcggcattgcagcggcgttgcgcatgcgggcgcgcggctattccgtcacccttgtggatcggcttcaggccattggcggccgggcccaggtgttcgagcgcggcggctttcgccatgacgccggcccgacggtgatcacggcccctttcctttttgacgagctgttcgagctgttcggcgaaaaacgcgaggatcaccttgatttccgaccactcgacccgtggtacaggttccatttcgatgacggcagccagtttgattaccgggccaccgtcaaggacaccaatcgtgaaatcgagcgcttctcgccggccgatgtgaagggctatgccgggctgctcgagacatcgaagcggattttcgaggtcggcttcgagaaacttgccgaccgcccgttcacccgcttcacctcgatgatggctcaggtgccggcacttctacgcctgcggagctaccggaccgtcgccgggctggtgaacagccatatcaagcatccgctgttgcgtcaggccttctccatccacccgcttcttgtcggcggcaatcccttcaccacgacatcgatctatgcgctgatccattatcttgagcgtcgctggggcgtgttcttctgcatgggtggcaccggccgccttgtcgaacagctgcatcgccttctcgagagggccggcgttcaggtcgagctcggcgtcgatatcgaaagcatcaccacaagtggcggcctcgcgagcggtgcaacggcgatcgacgggcgtcattttcctgccgaccgcgtgatttgcaacggtgatccgccgacggtctatcagcagatgatgcccggcgaggcacggtccaagcgcgcgcttcccgaagcggcgacgcaatattccatgggtctctacgtgctgttcttcggcacgaagcggacctatgaggatgtggcgcaccatacgatctggatgggcccccgctatcgtgaactgctggccgacatcttcgaccgcaagatccttgccgatgatttctcgctctatcttcatcggccgacagcgacggatgaaagtttcgcaccagagggatgcgacagtttctatgttctctgcccggtgcccaatctgcttggtgacgttgactggtcagttgaagggcggaagctgcgcgaccgcatcgtagcggccctggaacgcaccatcatgcccggactcggcgagtccatcacggacgatttctggatgacgcccgaagattttctgaatgattacagatctatgcacggtgctggcttttccatagcaccgatcttcatacagtcggcctggttccgctaccacaatcgtgacccgcatattcccaatctatatttcgccgcggccggagcgcatcccggagcagggatgccaggcgtgctgtgttctgctaaggttgtcgagcgtctgatcgaagaagaggagcaggctggcgcccggcacctggcgcgctcggcctga

SEQ ID NO: 147 - DNA, 1398 bp, Pyrobaculum arsenaticum
atgagggctatcgtgatagggggcggcttcggcgggctggcctctgcggctttactcgcaaaacggggctacgaggttgttttggtagagaagaactgcagacttggcggcagatctgttctttacgacatccgtggccacagggtcgagataggtccgacgtggtacctaatggacgacgtcatagacaaggtgttgggcgagatcggcggtaggacgtacgaggtggctgagcttaaccccagtatgatgttcgtggacaggcgccacggcaagatcgaggtagggagagatctgccgcaacgccttgaagagctggagcagggggcgggggatcgttctgttgagctcatgcgcgaagctggcaggctgtatcaagttgtcgtggagcacatgttgctgagaaagtacgagacgtggctcgacatgctgtcggccgcaaaggccggggcaggtttcgccaagtacctcgtgaccagcttcggaagccttgtggagaggaggtttaaatcgcctttaatacagcgccttttggagtatgatatcatgtttctagggagccccccgcgcgagttgcccgcgctctacggcctacttcttaactactccgtcttcgtgagaggtgttaaggcgcctaagggcggcttcgccgctgttatccgtaatttaatagaagccggggcccgactgggggtagacttcaggacatgcacagcggcgaggaggattttggtggagggcggcaaagtgaggggcgtggagacagccagcggggttttggagtcggacgtggtggtgatcaacgccgactacaagcgaggcgaggagcttctggagccccggtacagatcttacggcgaggcttactggggccgggtcaagatggcgccgtctgcgtacatggcgttgctgagcggggatcggtgggaggggccgccccacttgatatacatctctgagtgggagcgacacctatcggcccttaccggcggcggggatatgcctcagctcccctctttctacctccacgtgcccagcgtagtggagcccgactgggccccacccggaaggtcgagcatgtttatcctagtgccttcgccgcctggagtagactattggccaagggggctagccgagaagctagcggcggaggccaccggcggctcggccgagacgctggcggagtttcccagccgcttcttctgcgactactacggcgcctaccagtgcacggcgcttggccccaggcacacgctacgccagaccgccctgggcaggcctttaatgagaggccgaatggtacgtgggctgtacttcgtggggcagtacacccattcgggcatcggcgtgccatcggtgctggcctcggcgtacatcttggctcggtactatgtctag

SEQ ID NO: 148 - DNA, 1545 bp, Thermosynechococcus elongatus
atggcaaagcatgtggtcgtcattggcggcggcattggtggtctgacgacagcagccttgttggcccgacggggctaccgcgttcaactatttgaacaggcggcccaattaggcggctgtgcttcaacctttcagcggcgtggctttacctttgatgtgggtgccacccaagtggcgggtctggagccgggggggatccatgcccagatttttgctgaattggagatgcctctgccgcccgcaaccccctgtgaccccgcctgtgcggtgtatctgccgcaggaaacaacgcccattcatgtttggcgcgatcgcgatcgctggcgactagaacgtcaacgccactttcccggcagtgagcgattttggcaaggccttgaacaactttttgccattagttggcgatttcagcagcggcagccaattttgcccccccgcaatggctttgatctgtggcaactggtgcaagccctccgtcccgataccctcctcacggtgcccttcagtctaatgacggtaaccgattggctgaatctctgtggtctggggagcgatcgccggctgcggcaatttctggatctgcaactcaagctctactcccaagtggacgccagtgaaacagcattgctctatgcggccaccgccctctgcctttcccaggagccccacggtctttaccatctccacggcagtatgcaggttctcagtgatttgctagccaatgccttgcggcgggatggcggccaaatctacacccgtcatcgggtgcatgacattgcagtcgagggagggcgtgccgtcgccgtccaggtggaaaacctaaaaacaaaaaccttggagcgcgttgaagccgatcacattgtggccaatgtccctgcccaaaacctgccccaactccttggcgatgcccttccccctggctatgcccgccgcctaaaaagactgcctccggcctccggtgcctttgtcctctatctgggagtgaaggaggccgccattccggaagtctgtccaccccacctgcaatttctctacgatcctcaggggccaattggcgaaaacaactccctctttgtttctgtgagtcaaccccaggatggccgtgctccccagggctatcgtaccctgattgcctccagttttactgaaccgaatttctggcggcagcccgacttagattacaccgccaccaaggcacaatatacccaaacagctctggaacgcctaggggaattctttgatctgcggcctgagtacattgtccactgcgaagcggccactccccgcaccttctggcgctacacggcacgaatagatggcattgtcggtggcatcagtcaacgcctgagtacctttggcccctttggcttggcaagccgcacccccattccccacctgtggttagtgggagattccgtgcatccgggggaaggcactgccggcgtcagctatggtgcccgtgcccttgtccaacaggtggttgccagtgatagcaattttggtaaaagtcactataatagagggacactgaggctaatcaattga

SEQ ID NO: 149 - DNA, 1482 bp, Picrophilus torridus
atgaagatagtaatagttggtggcggatatgcaggtctatcacttgcaaacctcgttgcaagggacaatgatgtaatcctcattgaaaaaaataaaactcttggtggcagatcaagatctttttatgcagatggttataaattcgatatgggcccatcatggtatttaatgccagaggtttttgagcattattttcaatcacttggcttatcaaggcatgatttttattcaataaaaaggcttgatcctgcatttagaatatgcattgaaaacagctgttataatataagggctgatccatacaataatatgaatctctttaacagccttgaggatgatggctataaaaaatttgatctttatcttgaggaaacaaaaaagatatacgatgcggttttccctgattttatatacagagatttctcatcatttaaggatatgctatcaccggacatcctaaaaaatgtatcaaagcttcatctccttgattccatgatggatctgtcaagatcattcttctcttcaaaatcaatgaggtacataacaacattttcatccgtctttcttggcggaaatccatttaacatacctgcattttactcgatggtaaactattcaatgttcaacgatggcgtttactatccagagaatggcttttcatctgttgtttcatcgctatataaaataggaagatcgttaaatgtaaggtatataacatcgtgcgaggttggtggtattaacataaataacaatgaaatatcatcaatcatggcaggaaataataaaatcgatggtgatctatttatctttgcaggcgattattacaatgcagaatccatgctgccccctggctttagaaactattcagaatcgttctggaaaacaagaaggctttcgccatccgcagttctcgcatacataggactcaagaaaaagcttgcaattgaacaccataatattataatacctgcagaatggaacgatcattttaattcaatagattccggatcaaaatacatacctgaaaacttttcattctatttaagtgttagaagcaaaacagataaaaatgcagcacctgaaaacatggattcaatttttatgctaataccggcatcgccattcataattgatactgaattttacagaagcaggtatgtatttgccgcactttcaaaacttgaggaatatctaaatgaaaatataatagattatatagactttataaaatattatggtccttccgattttaaatcagattacaattcctttatgggaaccgcctttggacttgcaaacacaatgctccagactgcatatttcaggccattaaacaggaacaggcttttaaggaacatgtattacacaggacagtacacccaccctggaataggtgttccaatggcttttgtatctgccgaggtgatatacaataaattaattaaagaaaaagtcaagtccactggagaaattaccatgtga

SEQ ID NO: 150 - DNA, 1611 bp, Salinibacter ruber
atgagttggctcacccgcctcgcccaccgcgacgacgccaccctcaacacgcgcaccgaaccggcaccggccgggcccgacgcgccccacgccgtcgtcgttggggccggaatgggcgggctcgcgtccgccgtccgattgcgggcgcgtggctttcgggtgacgcttctcgaccgcctcgaccagcccggcggccgggcgcgcgtcttcgagcaggacggctttacgttcgacgccgggcccaccgtcatcaccgcgccgtttctgttcgaggagctctggtccctctgcgggcgcgaccttgaggacgacgtggagctcgtgcccgtcgaccccttctaccgcatccgcttcgacgacgggaccgccttcaactacacgggcgacaccgacgaaatggtggaggaaatccgccgcttcgcgccggaggacgtggacgggtaccggcgcttcctggaaaagagcgaagagatcttcgaggtcggcttcgaggagctcggccacgtgccgttcgacaacgtgacggacatgctccgcatcgtgccggcgatgatgaagctggagagccaccgcacggtgcacagcctcgtctccaagtacatctcccaccccaagatccggaaggtgctgtccttccacccgctgttggtgggggggaacccgttcagcacgacctccatctacacgctcatcgcacatctggagcgcaagtggggcgtgtggtacgccatgggcggcaccggctcgctcgtgcagggcctgtcggacctccttgcggacctcgacgtcacgcagcgctacggtgcggaggtcgatcagattctcgtggaggacgagacggccagcggggtgcgcctctcctcgggcgagggaatccccgccgacctcgtggtctccaacgccgacgtgggctggacctaccggcacctcgtggcgcccgagcaccgcgacacgtggacggaccgcaaggtggaggacatggactactcgatgagcctgttcgtctggtacttcgggacggaccgcacctacgaggacgtggagcaccactccatcctgctggggccgcggtacaaagggctgctcgacgacattttcgaccacaaggagctggccgacgacttcagtctctacctgcatcgccccacgaagacggacccgtcgatggcgcccgacggccacgacgcgttctacgtcctttcgccggtgccgcacctggaaagcggggtggactggcgccagcaggccgagccgtaccggcaggccgtggaggagtacctcgccgacacggtgctgccggacctcggggagcacctcgtcacgagtcgcatgctcacgccccgcgaatttaagacggactacaagtcgctcaagggggcggcgtttagcgtggagccgaagctcacccagagtgcctggttccggccccacaaccagagcgaggacgtggaccacctctacttcgccggcgccggcacccatccgggggccggcctgccgggcgtgctctcgtcggcccgcgtgctggacacgatcgtgccggccccggacgcgttcgacgtgtccgttccgcagaacggcgccggagcacacccggagccggtcgcgtaa

SEQ ID NO: 151 - DNA, 1131 bp, Unknown
  source: /note="Description of Unknown Sequence: Uncultured marine bacterium"
atgatcagaacagcctccctagaacagacagaattggcaattattggagcaggctgtgccggcctgtcgttggcccgccagctggtgcggacagaaaagacatcaattataaaggcttgtctgtatggtcctgtctctcccgccgcaacaaataggcatagttggggattctgggcaacacagggacttaaagagcagaccgagctctcaagacaacgctggcataaatggcagattatcacagcagaacggaaggttacgcaaacagctgattctcatccctactgccgtctcgatagccgtgattggctgacccattgtctgaacattatagacggtaatattcagcaaaagcctgacaacctgcctacacccggcgcccaacctgtctttgacagccgccctccaaatgtgcctgagggggccttgctgcagcattttaagggtgtggagatcaaagcagcacaaccttgtttttcacctgatacggctattttaatggatttcagatgtgaccaatcccgcggcattcatttcatctatctgcttccttacagccctacggaggcattagtcgaatctaccatgctttcccctaaacggcagaacgatgacttttatgcagaggccataaaaacctatttggaaacttattgggcgactggcggctggcaagtcaagcatactgagcagggctgtattccgatggcttttgtacaaccagtcaatctcgattatctgcccatcggtgcaaatggcggttgtgttcgcccgtcatctggctatgcgtttgcctttatccaaaaacatacagatgctattattgacagactggtcctcagtggtacagaccccttaacgccagcaacaatgcctcgaccaatcagtcgttttgatctgtttctggacagaatctttctgcacgtcatccggcatcaccctgaaaaggcagctgagttgtttgcgcagatcgcccttgccctgaacggcgatgaattcgcccgctttatgtctggccttgcagatttcaaaatctatgcaaaactgatcacggcaatgccagccggcctgtttttacacgcattgtggaatatacatgtgaccaacagagataacgcggataaaaaataa

SEQ ID NO: 152 - DNA, 1149 bp, Unknown
  source: /note="Description of Unknown Sequence: Uncultured marine bacterium"
atgacgaccgccttcacgcagcactgcgggggctgccctatgtcgcctgaccacgccatgcggcaggttcgtgtccttggtgacggctgcgccgcgctgtcgctggcggcgcgcgccaatgaactggcgggccataggctgacacttgtcaggccgcgaggcgccccgcaggagacggaccatatctggggtttctgggacggaccgaaccttgccgccgccagccgccttgcccgcaagcgctggcacagctggtcgatcgtgacccgccggggaaaggctgtattgcgatcacatgaacggccctacacggcgcttcaccggctggactggacggcgcattgccgtgaagcggccagacgtgccggcgttgcaatcctgaccggcggggaagctgcgacagcggcagaccaggtcttcgacagccgcccgccgccagtgccggacgacataatgctgcagcattttcttggcctcgaagtgcgaagcaagcgtgcgattttcgatccggataccgccattttgatggacttccgtgtggaccagtcgcgcggcatgcatttcatctatcttcttcccttttccgcgaccgaggcgctggttgaatccaccctgttcacgccatctgtctgtccgaagagctattatcgcagggaaatcgtcgcctatctcgaggcccatttcggactcgatgaattcgagacgcttcgcaccgaacgcggggtaatcccgcttggcatcttgccgccgcgcgatccgtccattccgggtgtaggcggcaatggtggcgcgatccgcccgtcgagcggctatgcctttccctttatccagaaacagatcgaccgtgccatcgccgcggcatgtgaggggcgcgagctcggctttgctatgccgcaccgccgtgttgatttgtggatggacgcggtgctgctgaccgttctgcgccactggccggaacaggctcccgaactgttcctgcggatggggcgtgcgctcgacggtgacgagttcgcacggttcctcagcggcgaggcggacttgccgctccggctgaaagtgatcatggcgatgccgaaggccccgttcctgcgcgggcttgtccgccttctggccggcagccggccacaacgcacggcagaggcgggatga

SEQ ID NO: 153 - DNA, 1131 bp, Unknown
  source: /note="Description of Unknown Sequence: Uncultured marine bacterium"
atgttgcgtgagacgacagagcgtccgcagcgcctgcgggtcctcggcgatggcgccgcggcgctgtcgctggcaatgcgcgccggagatcttgccagccatgagctgacccttgtcaggccgaaaggcgcgccgacgccggttgatcacatctgggggttctgggatggccctgacatgcctccggctgtgtctgccgcctgccagctcgcccgcgccagctgggaccgctgggccattatcaccgccgatggcggggtggtgatgcagtctggcacacgccggtattcggcgcttcaccgaagcgcatggacgcgccattgcgaaaccgtggcgcagcaggccggggtcaggtcggtagatgaggctgagcttggtgatgaaggcgctgaccttgtgtttgacagccggccgccgccggtacctgacgggatcatgctgcagcatttcatcgggctcgaggtgcgaagcaaccggcctgtcttcgatgccggcaccgcgatcctgatggatttccgcgtcgaccagtctcgcggcatgcatttcatctatctgctgcctttctcggcgaccgaggcgctggtcgagtcgacgctgttctcgccggaccgtcttgaggagcagttctatctcgacgccatcgcggactatcttggcacgcattatggccttcacagctttgatacagtgcggcgcgaacgtggtgtaatcccgcttgccaggctgaagcaacgcgatccgaagattcagggaatcgggggaaatggcggggcgatccggccgtcaagcggctatgcctttgtcttcatccagaagcagatcgaccgggccatcaccgagatgcgggagagtggtcactttcaggtgcgcacgccgcacagtgccgtcgatctgtggatggatggtgtgctgctcagcgtgctgcgccactggccagagcgtgccccggacctgttcctccgcatggggcgggcgctcgatggggacgagtttgcaagattcctgagcggagaggctgactggccattgcggctgaaggtcatcatggccatgccgaaatggccgtttctgcgtgggctgatgcgcctgatggcaggtggatcaccgcaccacacggcggcggcccggtga

SEQ ID NO: 154 - DNA, 1113 bp, Unknown
  source: /note="Description of Unknown Sequence: Uncultured marine bacterium"
atgttgcctgatacaggaatgcgcgagatccgcatccttggtgacggttgtgccgcactgtcgctggcggcgcgggcaaccgagctccccagccacaagattacccttgtcagacctgagggcgctccacccgacagtgaacatatctgggggttctggggaaccgacaagacggatattgcgggccggatcgcccgcgcaagctggtccagatgggccatcgtcacatctgagggaagggccgagatgagctcgcagacccgtccctatttcgcattgcggcgcagtgactggacggcgcattgccgacaggcggcgatggaggcgggtgttgccgttcttgacggctgcgagaccgaagcggcgccagcagcgcacattttcgacagccgaccaccacgcgttccgcgcggctgcatgctgcagcatttcatcgggtttgaagttcgggcgccgaagccggtttttgatcccgaaaccgtcatcctgatggatttccgggtggatcagtcgcaaggcatgcatttcatctatcttcttcccttctccgcaaccgaagcgcttgttgaatcgacacttttttcggcgcgtacgcttgaggaagatttctataccaacgccatcgacagctatcttgaacgctatttcggtctgacgtcctttgaaatcctgcgccgcgagcgaggcgtgatcccgctcgccaaactgccacggcgggatccggaaatccccggacttggtggcaatggcggggccattcgcccttcgagcggctatgctttcatcttcatccagaaacaggtttccgaggccattgaatcggcgaagctgaccggaaggctcgtcgtgaagtcaccgcatcggcagatcgatctgtggatggacgctgtcctcctgtccgtgctcaggcactggccggagcatgcgccggatctgttcatgcgaatggcgcgggccctgtccggagacgaattcgcccggttcctcagcggcgaggccgggtgggggttgcgactgaaagtggtcatggcaatgccgaaatggcccttcatccgtgccactctcaggcttgttaccggcggacgcggcatgagtcccgtcgaggcggcgtga

SEQ ID NO: 155 - DNA, 738 bp, Picrophilus torridus
atggatataacgcatttctactattttataatactttccttcatattcttcccggttcttggcatatcacttacaaatgaatttaaaaaggtaaggaattacagggcattgttatatgcaatgctttttactgatcctgtttacatagtatgggactcactttctgtaacttaccatgtatggacatttaataaaaaatatataacaggcataatggtttataatcttcctgttgaggagatacttttcttttttgtggttccattcagcacctttcttatatatgaatccatagactacattaaaaatgattcctttatatcaaaaacatcaagaataaaaaagataatgtttattatagcaattcttttcattttaaatgctatatacttttattcatacatatacatgcttcttgcatctgtatttacagcctttattatattattaacgcttaaaataatgccatcactttacaggtcatcgaactactggctttttataataataatgtacattccatttatagtatttgatcattttttaacctcgcttcctgtttttacatacggtgttcatgcaattataaatataagaatattgagcataccggttgaggaatttatatatgtgtattcactgatgaatttctatgcgcttttttataatatttacaaaaagcgttcgaataaagatgaattaaaatttattgttaattacccattaaggataaaatga

SEQ ID NO: 156 - DNA, 861 bp, Unknown
  source: /note="Description of Unknown Sequence: Uncultured marine bacterium"
atgatagatatcttatcagtaacagacctatttgcccttgcagcggtgatgctgattggtttgccccatggtgcatttgacggcgcccttgccttttgtttaggctttgggcgcagtcctggcaaaattattggttttctggtcatgtatctgttattggccgggttgtctgccttgatctggcttgtatcacctgtcttcgccctagctggttttttggtgctaaccattgtgcattttggtagcggcgatacagaacatctgtttcaaccaggcccgcgcgttgtccagcgcagcctgaaagcctgtcagattctggtgcatggtggcatggtgactattttattgcctgtgtttcacacaacagaggtgagccaactgtttattgttcttgccgggccaaatgcggttctgatcattgatgcgctgagaccagcgctgaaaatctggcttgcagctgcctgtatttacgctagcgcagcccttttcaaacgccaatatgctgctgcggcaggtgaactggctgggctggctgtgctagtgtggctattgccgcccttagcaggttttgcggtttatttctgtattgtacattcacgccgtcattttactagtatctggaaagctatgcagctctttgtcagccgccgcttcattctaatcagcggcggaattctgaccgcagcatcctgggcgatgggcgcagggctatattttagccagacaatgtcaggcagtttttcaccagatgaagcctttatccgcacagtctttatcctgttagctgctttgacggtaccgcatatgttgttggtggatacaatgtaccgccccacattgaaaaagattacacagccatga

SEQ ID NO: 157 - DNA, 831 bp, Unknown
  source: /note="Description of Unknown Sequence: Uncultured marine bacterium"
atggcgccgctcgaccttgcggcgctggccgccatagtgctgatcggcctgccgcatggcgcgctcgacggggcgatcgccatccatctcggcttcacccggaaaattctgcatttcatttggtttctggcgctttatatcgcgatggccggggttgtcgtcgcggcatggctgctggcgccgaccgcctgcctgctgggcttcctgattatcagcatgctgcattttggtgctggtgacgcgcgccacggaaccggctggctccgcagtgccgagattctggcccatggcggccttgtcatcgtcggcatcagccagatgcatcatgtagaggtagatgtcatctttggttatctgaccgggcgcgatacggcgctcctctggcaaggcatcgatgttctgacgttgattgtcgggatggctgttgtcgtctgccttgcccaggcgctctggcatcggcgctggcgcgggacggctttcgagctcggcgcgcttgcggtactgtttgcgttgacaccgccattggtcggttttgccgtctatttctgctgtgtgcactcggcaaggcatgtctacggcatcgttaacagcttgcggcgcgaaatctcgcggttcagcctgctcaaccaggccgctgccttttccgtggcaagttgggttgccggcggtgccgccatcttgtggtttgccgatatgtccaatcctgagcctttcgtgctacgggtggtgtttatcggccttgcggcgctgacggtgccgcatatgattcttgtcgatggtttcttcaggcggtccggcaggaccctgaagcgccagtttatcagccggtag

SEQ ID NO: 158 - DNA, 930 bp, Unknown
  source: /note="Description of Unknown Sequence: Uncultured marine bacterium"
atggccgtttctgcgtgggctgatgcgcctgatggcaggtggatcaccgcaccacacggcggcggcccggtgatgggggtgatgagcgccatcggtgcgatgccgccggttgatcttatcgcgctggcggcggttgcggtgattggcctgccccacggggcgcttgacggggccattgccatgcatcttggatttgtacgcaagcccctgaatttcatctggtttctctgtctctacatggccatggccgggctggtgattggcgtctggatggtggcacctgcggtcagtcttcttctgttccttctgatcagcatgctgcatttcggggccggtgacgcccgccacggcagcggttggcttcgcacaacagagatcattgcgcatggcgggcttgttgttgtcgggatcagccagcttcaccattctgaggtggatatcatcttcggctatctgaccgggggcgacacatctcttgtctggcagggtcttggattcatgacggtgatcgtcggcgccgcagtcgtcatctgtatcggtcagggcctgtggcatcggcgctggcgtggctccgcgctggaacttgtggctcttggtgtgctgtttgcgatgaccccgcctctggtcgggttcgcaatctatttctgccttgtgcattcggcgcggcatgttgccgggatcattggcagccttcgtcgtgagatgtcgcgcttcgcgctggtcaaccaggccgcctgcctgaccgtggcaagctgggctgccggcggactggcattgtggtggttcgctgatcagggcaaccccgagccaatgctgatgcgggtgatcttcatcggacttgcggcgctgaccgtaccgcatatgattcttgtcgatggcatttaccgccggacgacaccctcgctgaagcgtcagttcatgaacaggtga

SEQ ID NO: 159 - DNA, 852 bp, Unknown
  source: /note="Description of Unknown Sequence: Uncultured marine bacterium"
atggttgccggaatgctcacaatgacgagccttgacctcgtcgcattggccgccgtggtgctgatcggcctgccgcacggtgcccttgacggcgcgatcgccatgcatcttggctatgcgaacaagatattgaatttcatcagctttatcgtcctgtatgtcttgatggcgggcctcgtcgtggctttatggatcgtcatgcccgccccgtgtctgctcgcgttcctgattatcagcatgatccattttggttcgggagacgcgcgtcatggtacgggctggatgcgtggtgctgaaattatggcccatggcggacttgtggtcgccggcatcagccagatgcaccgcaccgaggtcgatgttgtcttcggctatcttgtcggtggcgacacgacctttgtatggagcgggttggacataatcacggtctttgtcggcgtttccattattgtctttgtcagccaggctctctggtttcggaaatggcgctcgactgcagtcgaacttgcgcttctggcaacgttgtttgccgtggttccaccgcttgtcggctttgctgtctatttctgccttgtgcattcagcacggcatgtagccggaattgtcagcaacctgagacgttacatgtctgttgcgagcctatgtgtccagaccctggccttcacgctggcaagctggcttgccggcgtggcggctgtctggtggcttgccgacatgacaaaccccgaaccgacggttctgcgggtgattttcatcggccttgcggccctcaccgtgccgcacatgattcttgtcgacgggttctaccgtcggtcttcgaaatcccttaagcggcgtttcatcagccgctag

SEQ ID NO: 160 - DNA, 510 bp, Picrophilus torridus
atgataatccagtatttatactatgccgcagggatagtatctggtttaataggcatggaattcatagcaagattaacacataagtacctgatgcatggtattctgtggccaatacataaggatcatcatataccatcaggaagaaggttccagagaaacaatttatttgcattgttctttgcatttatatcgatgtccctgttcatagcaagctttgaaacaaaggactttatatacatgtcattcggcataggcatgctgttttatggaatattatatttaatcattcatgatatgataatacataattattatcttcatttaagaaatagaaaacattcaagatatattaataaattaatagaggttcacgagcttcaccatataaacgacggccgcggaaagggcatgaactggggatttcttttatacatacctggaatagataaaacaagggcggatcttgaaaggatcaattcaaagaaaaatcttgatacattgaagcagtga

SEQ ID NO: 161 - DNA, 1563 bp, Salinibacter ruber
atgggcgcatgcgattccggcgggggctgccccccccaggctgtctcctccgcagccccgcgccgcggggcgggcgccggccggtcgcccgcgaacccctcacgggggctgccgcttcaaaacaccccgtgcctgtgtccgcgcccatgctgccgcccgccgatgtctgactaccgccgtggcttcgagagcctccgccaagaactccacgagccgtccctgccggtggagggggagtggccggactggctggagggcaccctcatccgcaacggaccggcgcaattcgaggtgggggacgaggactacaaccactggttcgacggccacgcgatgctgcacgcatttcggatgcgggacgggaccgtgtcgtaccgcaaccggttcgtgcggtcgcagagccgcacggaggcgctggagcaggggcgaatcgcgcggtccgagtttgcgacggacccctgcatgtcgctcttcgggcgggtgatgagcgtattcaaccccaaccccacggacaacgccagcatcaacgtcgcccgcctggacgaccagtacgtcgcgctgacggccacgccccttcccgtcgccttcgacccggagacactggagaccgcaggggtggtggagtacgacgacgacgtggacgtggacatgtcgacgccgcatccgcaggtcgaaccgggcacggggcgcatgctcttccacacgttgtccttcgggcgtcagtgccagtacggcgtctacggcacggaggcagaaggcaaaacgcgccgcccggtcgcgacgctggacgtggaccggccgagctacatgcacagcttcggcatgtcggagcgctacgtcatcctgtcggagtggccgctcgtggtgaacccgacggacctgctgctccgtgggcggccgttcatcgagaactttgagtggcagccggagcgggggacccggttccgcgtgctccggaaggcggatggcgccgaggtggcgacctgtgaggcggaggcggcgtttggcttccaccacgtcaatgccttcgagcgggacggggcggtggtctgcgacgtcgtcacgtacccggacgcgtcggtcgttgaggagctctccctcgaccggctgcgcagcgacgccccgtcgcgcggcagtgggcacctgcgccggtatcgactgccccttgacggcggggcggccgcctctacgctccggggggaggagcgcatcgagctgccgcgcatccacgacggcccggcgacgggccgcccctaccagtacgtctacggcgtggggacgcgggcggcggggcagtttacggaccagctcgtgaagaccgacgtgccggcgggcacggcgcagacgtggcacgaagagggcacgtacccgggcgagccggtctttgtggccgcgccggatggggcacgcgaagacgacggggtggtgctgtccgtggtgctggacccggacgcccagcagtcgttcctgctcgtcctcgacgcgccctcgttcacggagcgggcgcgggccgccgtcccccacccaatcccattcgggttccacgggcagttcttcgactga

SEQ ID NO: 162 - DNA, 1020 bp, Unknown
  source: /note="Description of Unknown Sequence: Uncultured marine bacterium"
atgacccgaacaagcacgccgctaacaactgatcgtaaaaatgcgcatcttgatctggccaagaccagccagcccctcgccgaccacccgctggatgcggtgagcctgccttattgcgcgctaccggaatgtgatttaaacagagtcagccttaccacagaatttctcggaattgagctggattccccgctaataataacaggcatgactggcggtacagaccgggccatggcgataaacagggtactagcagataccgcccagaagaaaaaggttgcgcttggacttggatctcaacgtgccagccttgaatcagggcaaagtcaggctgagctgcgccgtctggctcctgatgctgttctgattggaaacctgggcggcgcgcagctcgctggaaaggacggactgaagctggcccgcgctgctgttgaagatatcagagctgatgcgctagcaattcatttaaaccccttgcaagaagccattcaaccggaaggtgatcatgactggcgcggggtattatcggcgattgaaacggctgttggtacgctgaattgtcctgtgctagttaaagaggtgggagcaggcctgtctggtaatgtagtgcgacggctggcagccattggtgtacggcatgtggatgtcgcggccagaggcgggacaaactgggcccaaattgagcttaacagacgcccggaaactgaccgagcgcattatgcgccctttttatcctgcggcctgatgttgcctgatgcgattgcgcaggcccgggctgtatccaaccacctgtgtataattgcctctggtggagtccggcatggcttggatgcggcgaaatgcttgtggttgggagcagatttagttggcatggcaggtcatatcctgcgtacagtagaagataacgctggtcatctgcatccaaaacagttgagcgacttgctgtataccgtgcaacagcaattgcgcttaagcctgtttctagccggaaaatcatctataaaagccttcaaaagggaataa

SEQ ID NO: 163 - DNA, 1086 bp, Unknown
  source: /note="Description of Unknown Sequence: Uncultured marine bacterium"
atggatgatatgcatgaaaacgctggaacaccgtccgcaggcgatcgcaaggatgcgcatcttgctctggccgccgacgcattgtcccgctccgggattagtgccggcttcgagcgtgtgcggctcgagcattgcgcccttcccgagtgcagccttgccgatatcgatatcaccacttcctgccttggcaggcccgtcgaggcaccgctgttcatcgggtcgatgacgggcggcacggcgcatgccgatgcgatcaatgcggtgcttgccgacacagccgaggccaccgggatcgcgctggctgtgggctcgcagcgcgccagcattgaatcaggccgttcccaggcggtactgcggcagcgcgcgccatcggtgccgctgatcggcaatctgggcggtgtgcagctcgccgcgccgggtggtattgatctggcatgccgcgccgtggtggatatcggcgccgatgccatcttcatccatctgaacccgcttcaggaggcggtccagcccgagggcgagacggactggcgtggtgttctggacgcaatcgagacccttgtcggtgtgctggaggtgccggtgatggtcaaggaggtcggcgccgggatcgggcccgatgttgcgcagcgcctgtttgatgccggggtccatgctgttgatatcgccgggctgggcggcacgaactggacacgtatcgaggcggcgcgccgcgaggatgccgccctgttcgagccgttcctcgactgggggttgccgacggtagatgcgctccgcgctgtcaggagcgcctgcccgaacgccaggctgatcgcatccggtggtgtggaaaacggtctcgacgccgccaaggcattgtggcttggcgcggcgctggtctcgatggccggaccagtgctgcgcgtgctgactggcgacgggcgtggtgcacctgacggggccgcggcggtgcatgtcatcgaacgctggaaatcgcagcttcgcctggcgctgttcctgaccggtgcgcccgacctgccgtcatttgctggcaagcccggtcatgtcggtgggccatatcagagggccattggtgcgcagaaccggtga

SEQ ID NO: 164 - DNA, 1056 bp, Unknown
  source: /note="Description of Unknown Sequence: Uncultured marine bacterium"
atggccggcaaggcacggaacgaccccaccccggcgacagcagatcgcaaggatgcgcatctggctctcgccgccgatccgcttgcccggtccggcgtgtcggctggattcgagctggtcacgctggaacattgcgccctgccggaatgtgacctggaagccgtggatatcagcaccacctgcctcgggcgcatggtctcggccccgctgtttgtcgggtcaatgacgggcggtacggcgcatgccgatgccatcaacgccgcactggcgcggaccgccgaggcgaccggccttccgctggctgttggctcgcagcgtgcaagtctggaatccaggcgctcgcaggccgagttgcgacagatggcaccgtcggtgcccctgatcggcaatcttggcggggtgcagctggccgctccgggcgggcttgatctggcaaggcgtgcgattgacgatctcgcagcggacgccatcttcatccatctgaacccgcttcaggaggcggcgcagcccgagggtgagaccggctggcgcggggtaatcgacgccattgaatcgcttgtaggcgtggttgaggtgccggtgatggccaaggaggttggagccggaatcggacccgatgtggcgcggcggctgtttgatgttggtgtgcatgccgtcgatgtcgctggactggggggcaccaactggacgcgaatcgaggtggcacgcagagaagatgccgagatgttcgagcccttcctcgactggggaattccgacagtcaccgcgcttcgtgccgtgcgcgccgcctgtcctggtgggcgcattatcggctcgggcgggatcgccaacgggctggaggcggccaaggcgctgtggcttggcgcgtcgctggtctcgatggcgggtccggtgcttcgcgcgctgaccggcgacgggcgtggcaaacccgatgctgaggctgccaccaaggtgatcgagcgctggaaatcacagcttcaactgacgctgttcctgactggcgcggagaatcttgatgccttcgccgccgttccggggcaggtgtccggccgctag

SEQ ID NO: 165 - DNA, 1035 bp, Unknown
  source: /note="Description of Unknown Sequence: Uncultured marine bacterium"
atgactgaaccgaagacgggtgaccgaaaagacgcgcatcttgcgcttgccgccagcggcgttgcgttgggtgaagaggatgccgggtttgaccgtgtcaggctggaacattgcgccctgccggaatgcgatctcgcggcgattgacatcacgacaagctgcctgggtcgggctgttggtgcaccgcttttcatcggtgccatgaccggtggcacggcacatgccgacgcgataaacacggcgcttgccgaggtcgccgaggaggcgcgtatcgcactggccgtcgggtcgcagcgggccagcatcgaagccggcaggtcgcagtcggcactgcgcgatcgcgcgccctcggtgccgctcatcggcaatctcggcggcgtgcagctggcgttgccgggcgggattgatctggctaggcgcgccgtcgacgatcttcaggccgatgccatcttcattcacctgaatccgcttcaggaagccgtgcagccggaagggcaaacggattggcgtcatgttctggcggcgctcgagacggctgttcgtgagcttgaggtgccggtgatggtcaaggaggtcggcgccggtatcggtcccgaggtggcaaagcgcttgttcgaagtcggggtgcacgctgttgacgtcgccggcctcggcgggaccaactggacccggatcgaagccgcgcggcgtgacgatgctgccgtcttcgacccgtttctcgactgggggttgccgacggtcgacgccatcagagcggctcgcgccgcctgtccgaacggccgtctgattgcttctggaggtgtccggcacgggcttgatgcggcaaaggccctgtggctcggcgcggcgcttgtctcgatggccgggccggtgcttcgcgccctgacgactgacggtattcaggcgccagacccgcgatcggcacttcaggcgatggaccgttgcaaggcgcagctgcgcctcgcgctgttcctgaccggtgcacccgaccttgcggcctttgccagggtgccgggctttattggcacgcgctga

SEQ ID NO: 166 - DNA, 1050 bp, Picrophilus torridus
atgatagagaatagaaaggaggagcatataaaaatagcggagaatgaaaacgttgtgtcagaacataacttctgggatgatataaggatagttcacagggccattccagaggttgattttaatgatatagacacgggtgtaaagtttcttggaaagcagtttaattaccctattttaatatcatcaatgactggcggcacagaaactgcaaaaataataaataaaaatcttgcaatgacggccgagcactttaagataggtatgggtgtcggcagcatgcgtgttgccgttaaaaacaaaaatacggcagatacattctctgttataaacgattacaagattccggcaaaattcgcaaatataggcgcaccgcagcttgttaggcaggactcggactccttatcagataatgacatagaatacatttataatttgataaacgcggattttcttatagtgcatttcaattttctgcaggagatggtacagcccgagggtgatagaaactcaaagggcgtaattaaaagactaaaggatatagccggatcatacaatgttatagcaaaggagacgggtagcggcttttcaaaggaggatgccctgagcctccttgatgccggtgtgaaggcaatagacgttggcggtcttggtgggacctcgtttgctgcaatagaatattacagggcacagaaggcaaatgatgagataaagatgcatactggcaaggccttctggaactggggcataccgtcgccggcatcgataaaatactgcagccttggggagcctgttataggcagcggcggtcttagaaatggcctggatctagcaaaggcaatcatgtttggtgcaacgcttggtggttttgccagggagctcttaaaggacgcaaacacatcatttgatgatgtaaaaaggcagatggagatgataataaacgatctaaaaataacaatgatgttaacatcatcaaggaacatcgatgagctaaaacatgcaaggtatataacactggagccattaaggtcctggcttgaagtttataaataa

SEQ ID NO: 167 - DNA, 1059 bp, Pyrobaculum arsenaticum
atggggatagacaagaggaaaaacgaccacatctacctcgcatcttctgatctatcccaagtaggcacggctcttttcgaggaggttgtcctaatacacaacgcgttgccggaaatagacttctcagatatcgacctctccactaatttccttggggcccccgttaaggcgccttttggaattggcgctatgaccggaggaacggagttggcaggtaaaatcaacgcggagttggcaaaagccgcagaggagtttggcatacctatgtacgtcgggtcacagagaattgcgttagtgaagcccgaggtcaggtggacttttgaagtggttaagcaaaacgcgccatccattcctaagattgccaatctcggtgcgccgcagttggctcagctttctgagaaacagctggtggactgggttgtgcaagctgtggatatgatagacgcctacgccgtggccgtccacctaaacgcagcgcaggaagtggtacaaccggagggggagcccagcttcaggggcgtgttggaaaaattaaaaattgtcaaaagggcggcaggacggccactcatagtcaaagaggtgggcaacggcatatcgaaagaggtggcggcgaagctggcggaggtggcagacgcaatagatgtgggggggcttggagggacttcttttgtggcgattgagggcgccagggcggccgatgcctggctccaaaggcgggttgccgagacgtttaagtattggggaatacccacagctgcctctatctgcgaggttaaatccgtgtatcgaggcttcgtaatagcgtctggcgggatcagaagcggactagacggagctagggctttggcgcttggcgcgcacttcttcacaatgtcccagccactcctaaaagccacgcttgagggaagactccgtgaggagatagaggcggtaattacagaggttaaaatcgccatgttcctcacaggagtgcgcaggccgcaagaactggcccaagtaccccgtgtctacggccccaggctgagggcttggctagaacaacgaggcacaacttgttga

SEQ ID NO: 168 - DNA, 630 bp, Salinibacter ruber
atggcgccttcgggcaacgagggccggccccaccattcacattgtggatggttccccaccgctttcccccgcctttggcccatgtcgcaccccgtcgtactggtcaacgaagacgaccaatcactcggcaccgccgataaacttcgggcacacgctgaggggtggctgcaccgtgccttttcggtgtttgtcttcgaccccaccggtcggctcctcctccaacggcgaaccgacgacaagtaccactccggcggcctctggtcgaacacctgttgcagtcacccccggccggaggagcccgcaatcgacggggcccatcgccggctgcccgaagagctcggctttacggccgccctcacgccggccttccaggaccgttacgagctccccgtcggggacgccctcgtggagcacgagcacaaccacgtgttcatcggcacggccgataccccccgcattcgtcccagtgccgacgaagtggacgactgggcgtgggtcgccccgtccgccctgcgcgacgacgtggcggcccgtccacaccggtatacggcgtggtttcggcaccttcttcccgctgccctcgccgctgccccgtccggcgacccgtcggcgtccgcccccatggcgtag

SEQ ID NO: 169 - protein, 209 aa, Artificial sequence
  source: /note="Description of Artificial Sequence: Engineered sequence derived from Salinibacter ruber; codons optimized for expression in Escherichia coli"
MAPSGNEGRPHHSHCGWFPTAFPRLWPMSHPVVLVNEDDQSLGTADKLRAHAEGWLHRAFSVFVFDPTGRLLLQRRTDDKYHSGGLWSNTCCSHPRPEEPAIDGAHRRLPEELGFTAALTPAFQDRYELPVGDALVEHEHNHVFIGTADTPRIRPSADEVDDWAWVAPSALRDDVAARPHRYTAWFRHLLPAALAAAPSGDPSASAPMA

SEQ ID NO: 170 - DNA, 630 bp, Artificial sequence
  source: /note="Description of Artificial Sequence: Engineered sequence derived from Salinibacter ruber; codons optimized for expression in Escherichia coli"
atggcaccgtctggcaacgagggtcgcccgcaccactcgcattgtggctggttcccgaccgcattcccgcgtctgtggccgatgagccacccggtggtgctggtgaatgaggacgatcaaagcctgggcaccgcggataaactgcgcgcccacgctgagggttggctgcatcgcgcgttcagcgttttcgtgttcgaccctaccggccgtctgctgttgcagcgtcgtaccgacgacaagtaccatagcggcggcttgtggagcaatacctgctgcagccacccgcgtcctgaggagccggccattgatggcgcccaccgtcgcctgccggaagaactgggtttcacggcagcgctgaccccggccttccaggaccgctacgaactgccggttggcgatgcgctggtggagcatgaacacaaccacgttttcatcggtaccgcagacaccccgcgtatccgtccgtccgccgatgaagttgacgactgggcatgggtggcgccgagcgcgctgcgtgacgacgtggccgcgcgtccgcatcgctatacggcgtggttccgtcacctgctgccggccgcgttggcagccgcgccgtccggtgatccaagcgcgagcgcaccgatggcttga

SEQ ID NO: 171 - protein, 352 aa, Artificial sequence
  source: /note="Description of Artificial Sequence: Engineered sequence derived from Pyrobaculum arsenaticum; codons optimized for expression in Escherichia coli"
MGIDKRKNDHIYLASSDLSQVGTALFEEVVLIHNALPEIDFSDIDLSTNFLGAPVKAPFGIGAMTGGTELAGKINAELAKAAEEFGIPMYVGSQRIALVKPEVRWTFEVVKQNAPSIPKIANLGAPQLAQLSEKQLVDWVVQAVDMIDAYAVAVHLNAAQEVVQPEGEPSFRGVLEKLKIVKRAAGRPLIVKEVGNGISKEVAAKLAEVADAIDVGGLGGTSFVAIEGARAADAWLQRRVAETFKYWGIPTAASICEVKSVYRGFVIASGGIRSGLDGARALALGAHFFTMSQPLLKATLEGRLREEIEAVITEVKIAMFLTGVRRPQELAQVPRVYGPRLRAWLEQRGTTC

SEQ ID NO: 172 - DNA, 1059 bp, Artificial sequence
  source: /note="Description of Artificial Sequence: Engineered sequence derived from Pyrobaculum arsenaticum; codons optimized for expression in Escherichia coli"
atgggtattgataaacgcaagaatgatcatatctacctggctagctctgacttgagccaagttggtaccgctttgttcgaagaagtcgttttgatccacaacgctttgccggagatcgatttcagcgatattgacctgagcaccaacttcctgggcgccccggttaaggcgccgtttggcatcggcgctatgacgggtggcaccgagctggcgggcaagattaatgcagagctggcgaaggctgcggaggaatttggtatcccgatgtacgttggttcgcaacgtattgctctggttaagccggaggtgcgttggacgtttgaagttgtcaagcagaatgcgccgagcatcccgaagattgccaacttgggtgccccgcagctggcgcagctgtccgagaagcaactggttgactgggttgtgcaggctgtggatatgattgacgcttatgcagtggcggtgcacctgaatgcagcacaggaagtggtgcaaccggaaggtgaaccgagctttcgtggcgtgctggagaagctgaagattgttaagcgtgccgcgggtcgtcctctgatcgttaaagaggtcggtaatggcatttctaaagaagtggcggcaaagctggcagaggtggcagatgcgatcgacgtgggcggtctgggtggtactagctttgttgcgattgaaggtgctcgcgcagccgacgcctggttgcagcgtcgcgttgctgagactttcaaatattggggcattccgaccgcggcttccatttgtgaagtgaagagcgtgtaccgtggttttgtcatcgccagcggcggcatccgcagcggtctggatggcgcccgcgcactggcattgggcgcacacttcttcactatgagccagccgctgctgaaggcaaccctggaaggccgtttgcgtgaggaaattgaagctgtcatcaccgaggtcaagatcgcgatgtttctgaccggtgtccgtcgcccgcaggaactggcgcaggtcccgcgtgtttacggcccgcgtctgcgcgcttggctggagcagcgcggtaccacctgttga

SEQ ID NO: 173 - protein, 349 aa, Artificial sequence
  source: /note="Description of Artificial Sequence: Engineered sequence derived from Picrophilus torridus; codons optimized for expression in Escherichia coli"
MIENRKEEHIKIAENENVVSEHNFWDDIRIVHRAIPEVDFNDIDTGVKFLGKQFNYPILISSMTGGTETAKIINKNLAMTAEHFKIGMGVGSMRVAVKNKNTADTFSVINDYKIPAKFANIGAPQLVRQDSDSLSDNDIEYIYNLINADFLIVHFNFLQEMVQPEGDRNSKGVIKRLKDIAGSYNVIAKETGSGFSKEDALSLLDAGVKAIDVGGLGGTSFAAIEYYRAQKANDEIKMHTGKAFWNWGIPSPASIKYCSLGEPVIGSGGLRNGLDLAKAIMFGATLGGFARELLKDANTSFDDVKRQMEMIINDLKITMMLTSSRNIDELKHARYITLEPLRSWLEVYK

SEQ ID NO: 174 - DNA, 1050 bp, Artificial sequence
  source: /note="Description of Artificial Sequence: Engineered sequence derived from Picrophilus torridus; codons optimized for expression in Escherichia coli"
atgatcgagaaccgcaaggaggaacatatcaaaattgccgaaaacgagaacgtggtgagcgaacacaacttttgggacgatattcgcatcgttcaccgtgcgatcccggaggtcgattttaatgatattgatactggtgttaaatttctgggtaagcaattcaattatccaatcctgattagctcgatgactggcggtaccgaaaccgccaaaattattaacaagaatctggcaatgaccgcagagcactttaaaatcggtatgggtgtcggctccatgcgtgttgcagttaagaacaagaataccgccgacaccttcagcgttattaacgattataaaatcccggcgaaatttgcgaacatcggtgctccacagctggtgcgtcaggatagcgatagcctgagcgacaacgatatcgagtatatttacaacctgatcaatgcggacttcctgatcgtgcattttaattttctgcaagagatggttcagccggaaggcgaccgcaatagcaagggtgtgattaagcgtctgaaagatattgcgggtagctataacgtgatcgcgaaagaaacgggttcgggtttctccaaagaagatgccttgagcctgttggatgccggcgtgaaagcaattgatgtgggtggtctgggtggcaccagctttgcagcgatcgagtactaccgcgcacagaaagcaaacgacgagatcaaaatgcataccggtaaagcgttttggaattggggcatcccaagcccggcgagcattaagtactgtagcctgggcgaaccggttattggctctggtggtctgcgcaacggcctggatctggcaaaagctatcatgtttggtgcgaccctgggcggttttgcacgtgaattgctgaaagatgcgaacacgtcgtttgacgacgtgaagcgccaaatggaaatgatcatcaacgacctgaagattacgatgatgctgactagctcgcgtaatatcgacgaactgaagcacgcacgttacatcaccctggaaccgctgcgttcgtggctggaggtctataagtaa

SEQ ID NO: 175 - protein, 344 aa, Artificial sequence
  source: /note="Description of Artificial Sequence: Engineered sequence; codons optimized for expression in Escherichia coli"
MTEPKTGDRKDAHLALAASGVALGEEDAGFDRVRLEHCALPECDLAAIDITTSCLGRAVGAPLFIGAMTGGTAHADAINTALAEVAEEARIALAVGSQRASIEAGRSQSALRDRAPSVPLIGNLGGVQLALPGGIDLARRAVDDLQADAIFIHLNPLQEAVQPEGQTDWRHVLAALETAVRELEVPVMVKEVGAGIGPEVAKRLFEVGVHAVDVAGLGGTNWTRIEAARRDDAAVFDPFLDWGLPTVDAIRAARAACPNGRLIASGGVRHGLDAAKALWLGAALVSMAGPVLRALTTDGIQAPDPRSALQAMDRCKAQLRLALFLTGAPDLAAFARVPGFIGTR

SEQ ID NO: 176 - DNA, 1035 bp, Artificial sequence
  source: /note="Description of Artificial Sequence: Engineered sequence; codons optimized for expression in Escherichia coli"
atgaccgagccgaaaactggcgaccgtaaagacgcgcacctggcgttggcggcgagcggcgtggcattgggtgaagaagatgcaggtttcgatcgtgttcgtctggaacattgcgcattgccggaatgtgacctggcagcgatcgatatcaccaccagctgcctgggccgcgcagttggtgccccgctgttcatcggtgcgatgaccggtggcaccgcgcatgctgatgcgattaataccgcgctggcagaggtggcggaggaggcgcgtattgcattggccgtgggtagccaacgcgcatccatcgaagcgggtcgtagccagtccgcgctgcgtgatcgtgccccgtccgtcccgttgatcggtaatttgggcggtgtccaactggccttgccgggcggtattgatctggcacgtcgcgctgtggacgacctgcaagcagacgcgattttcattcacctgaatccgctgcaggaggcggtccaaccggaaggccaaaccgattggcgtcacgtgctggctgccctggaaaccgctgtccgcgaattggaagtgccggtgatggttaaggaggttggcgcgggcattggcccagaagttgcgaagcgcctgtttgaggtcggcgtccatgccgtggacgttgcaggcctgggtggtacgaattggacccgtatcgaggccgcccgtcgtgacgatgcggcagttttcgatccgtttctggattggggcctgccgacggtcgacgcaattcgtgcagcgcgtgcggcgtgtccgaatggtcgtttgatcgcaagcggcggcgttcgccacggtctggatgcggcgaaagcactgtggctgggcgccgcactggtgagcatggctggtccggttttgcgtgcactgaccaccgatggtattcaggctcctgacccgcgcagcgcactgcaggctatggaccgttgtaaggcacaactgcgtctggcgctgttcctgacgggtgcgcctgatttggcggcctttgcgcgtgtcccgggttttatcggcacccgctaa

SEQ ID NO: 177 - protein, 351 aa, Artificial sequence
  source: /note="Description of Artificial Sequence: Engineered sequence; codons optimized for expression in Escherichia coli"
MAGKARNDPTPATADRKDAHLALAADPLARSGVSAGFELVTLEHCALPECDLEAVDISTTCLGRMVSAPLFVGSMTGGTAHADAINAALARTAEATGLPLAVGSQRASLESRRSQAELRQMAPSVPLIGNLGGVQLAAPGGLDLARRAIDDLAADAIFIHLNPLQEAAQPEGETGWRGVIDAIESLVGVVEVPVMAKEVGAGIGPDVARRLFDVGVHAVDVAGLGGTNWTRIEVARREDAEMFEPFLDWGIPTVTALRAVRAACPGGRIIGSGGIANGLEAAKALWLGASLVSMAGPVLRALTGDGRGKPDAEAATKVIERWKSQLQLTLFLTGAENLDAFAAVPGQVSGR

SEQ ID NO: 178 - DNA, 1056 bp, Artificial sequence
  source: /note="Description of Artificial Sequence: Engineered sequence; codons optimized for expression in Escherichia coli"
atggcgggtaaggcacgcaacgatccgaccccggcaacggcggatcgtaaagacgcccatctggctctggcagcggacccgctggcgcgcagcggtgtgagcgcaggctttgaattggttaccctggaacactgcgctctgccggaatgtgacctggaggcggtcgatattagcacgacctgtttgggtcgtatggttagcgctcctctgtttgtgggtagcatgaccggtggtaccgcgcacgcggacgccattaatgcggcattggcacgcaccgcggaagcgacgggtctgccgctggcagtgggcagccagcgcgcctccctggagagccgtcgtagccaggctgagctgcgtcagatggccccgagcgtgccgctgatcggtaatctgggtggcgtgcagctggcggcgccgggtggcttggacctggctcgtcgtgcgattgacgacctggcggccgatgcaatcttcatccacctgaacccgctgcaggaggctgcccaaccggagggcgaaaccggctggcgtggtgttatcgacgcgatcgaatctctggttggcgtggtcgaggtgccggtgatggcgaaagaggtgggcgccggcatcggtccggacgttgcgcgccgtctgtttgacgtcggtgttcacgccgtggatgtggcaggcctgggtggcaccaactggacgcgtatcgaggttgcgcgtcgtgaggatgcggaaatgtttgaaccttttctggactggggcattccgactgtgaccgcactgcgtgcggttcgcgccgcctgtccgggtggtcgcattatcggcagcggcggtatcgcaaacggtctggaggcagccaaagcactgtggctgggcgcgagcctggtttctatggcgggtccggttctgcgtgcgctgaccggtgacggtcgtggtaagccggacgcggaggctgcgaccaaagttattgagcgctggaagtcgcaactgcaactgaccttgttcctgactggcgccgaaaacctggatgcctttgcagcagtcccaggtcaggtcagcggtcgctaa

SEQ ID NO: 179 - protein, 361 aa, Artificial sequence
  source: /note="Description of Artificial Sequence: Engineered sequence; codons optimized for expression in Escherichia coli"
MDDMHENAGTPSAGDRKDAHLALAADALSRSGISAGFERVRLEHCALPECSLADIDITTSCLGRPVEAPLFIGSMTGGTAHADAINAVLADTAEATGIALAVGSQRASIESGRSQAVLRQRAPSVPLIGNLGGVQLAAPGGIDLACRAVVDIGADAIFIHLNPLQEAVQPEGETDWRGVLDAIETLVGVLEVPVMVKEVGAGIGPDVAQRLFDAGVHAVDIAGLGGTNWTRIEAARREDAALFEPFLDWGLPTVDALRAVRSACPNARLIASGGVENGLDAAKALWLGAALVSMAGPVLRVLTGDGRGAPDGAAAVHVIERWKSQLRLALFLTGAPDLPSFAGKPGHVGGPYQRAIGAQNR

SEQ ID NO: 180 - DNA, 1086 bp, Artificial sequence
  source: /note="Description of Artificial Sequence: Engineered sequence; codons optimized for expression in Escherichia coli"
atggatgacatgcacgagaacgcaggtaccccgagcgccggtgatcgtaaagatgcgcacctggcactggctgcagacgcactgtctcgtagcggtatcagcgcaggcttcgagcgtgtgcgtctggagcattgcgcactgccggagtgcagcttggcagatattgacattaccacctcgtgcctgggccgtccggtcgaagccccgttgttcatcggcagcatgaccggcggcaccgctcatgccgacgctattaacgcggttctggcggacacggcagaggccaccggcatcgcgctggccgttggttctcagcgtgcgagcatcgaaagcggtcgctcccaagccgttctgcgtcagcgtgcaccgtctgtcccgctgatcggtaatctgggtggtgtgcagctggcggcgccgggtggcatcgatctggcctgtcgtgcagttgttgatatcggtgcagacgcgattttcatccatctgaacccgctgcaagaggcagttcagccggaaggtgaaactgattggcgtggtgtcctggacgcgattgagactctggtcggcgttctggaggtgccggtgatggttaaggaagttggcgcaggcattggtccggacgttgcccagcgtctgtttgatgcgggcgttcacgcggtcgacatcgcaggcctgggcggtaccaactggacccgcattgaagctgcgcgtcgcgaggacgctgcgctgtttgagccattcctggactggggtctgccgaccgtggacgctctgcgcgcggtgcgtagcgcctgtccaaatgctcgtctgattgccagcggtggtgtcgagaacggcctggacgcagcgaaggcgctgtggctgggtgcagctttggttagcatggcgggtccggtgctgcgtgttctgactggtgacggtcgtggtgcaccggatggcgcagcagcggtgcatgttatcgagcgttggaagtcccaactgcgcctggcgttgtttctgacgggtgctccggatttgccgagcttcgcgggcaagccaggtcacgttggcggtccgtaccaacgtgcaatcggcgcgcagaaccgttaa

SEQ ID NO: 181 - protein, 339 aa, Artificial sequence; identical to SEQ ID NO: 5
  source: /note="Description of Artificial Sequence: Engineered sequence; codons optimized for expression in Escherichia coli"

SEQ ID NO: 182 - DNA, 1020 bp, Artificial sequence
  source: /note="Description of Artificial Sequence: Engineered sequence; codons optimized for expression in Escherichia coli"
atgacgcgtaccagcacgccgctgaccacggatcgtaagaatgcccacctggacctggcgaaaacgagccagccgttggcggatcatccgctggatgcggttagcttgccgtactgtgccctgccggagtgcgatttgaaccgtgtcagcctgaccaccgagttcctgggcatcgaactggacagcccgctgattattacgggcatgacgggtggcacggaccgcgcgatggcaatcaatcgcgttctggccgacaccgcgcagaagaagaaggttgccctgggcctgggtagccagcgcgcaagcctggaatctggtcaaagccaagcggagttgcgtcgtttggcgccagacgcggttttgatcggtaacctgggtggtgcccaactggcgggcaaggatggtctgaagctggcgcgtgcggcggtcgaggacattcgtgccgacgcgctggccattcacctgaatccgctgcaggaggcgattcagccggagggtgatcacgattggcgtggtgtcttgagcgcgatcgagactgcggtcggtaccctgaactgcccagtcttggtgaaagaggttggtgcgggtctgagcggcaacgtggtccgccgcttggcagcgatcggtgtccgccacgttgacgtggccgctcgtggcggtacgaattgggcgcaaatcgagttgaaccgtcgcccggagactgaccgtgcgcattacgcaccgtttctgtcctgcggtctgatgttgccggacgcgatcgcacaagcgcgcgcggtcagcaaccatttgtgcattatcgccagcggcggcgttcgccacggtctggatgccgccaagtgtctgtggctgggcgctgatttggtgggcatggctggtcacattctgcgtaccgttgaggacaacgctggccacctgcatccgaagcaactgagcgacctgctgtataccgttcaacagcaactgcgcctgagcctgttcttggcaggtaaaagcagcatcaaagcctttaaacgcgaataa

SEQ ID NO: 183 - protein, 520 aa, Artificial sequence
  source: /note="Description of Artificial Sequence: Engineered sequence derived from Salinibacter ruber; codons optimized for expression in Escherichia coli"
MGACDSGGGCPPQAVSSAAPRRGAGAGRSPANPSRGLPLQNTPCLCPRPCCRPPMSDYRRGFESLRQELHEPSLPVEGEWPDWLEGTLIRNGPAQFEVGDEDYNHWFDGHAMLHAFRMRDGTVSYRNRFVRSQSRTEALEQGRIARSEFATDPCMSLFGRVMSVFNPNPTDNASINVARLDDQYVALTATPLPVAFDPETLETAGVVEYDDDVDVDMSTPHPQVEPGTGRMLFHTLSFGRQCQYGVYGTEAEGKTRRPVATLDVDRPSYMHSFGMSERYVILSEWPLVVNPTDLLLRGRPFIENFEWQPERGTRFRVLRKADGAEVATCEAEAAFGFHHVNAFERDGAVVCDVVTYPDASVVEELSLDRLRSDAPSRGSGHLRRYRLPLDGGAAASTLRGEERIELPRIHDGPATGRPYQYVYGVGTRAAGQFTDQLVKTDVPAGTAQTWHEEGTYPGEPVFVAAPDGAREDDGVVLSVVLDPDAQQSFLLVLDAPSFTERARAAVPHPIPFGFHGQFFD

SEQ ID NO: 184 - DNA, 1563 bp, Artificial sequence
  source: /note="Description of Artificial Sequence: Engineered sequence derived from Salinibacter ruber; codons optimized for expression in Escherichia coli"
atgggcgcatgtgacagcggtggcggctgcccgcctcaggcagtttcgagcgcagcaccgcgtcgtggtgccggcgcgggtcgtagcccggcgaatccgagccgcggcctgccgctgcagaatacgccgtgtctgtgtccgcgtccgtgctgccgcccgccgatgagcgactaccgccgtggttttgagagcctgcgtcaggaattgcacgaacctagcctgcctgttgagggcgagtggccggactggctggaaggcaccttgattcgtaatggcccggcgcagtttgaagtcggcgacgaggattataaccactggttcgacggtcacgcgatgttgcacgctttccgcatgcgcgacggcaccgttagctatcgtaaccgctttgtccgcagccagtctcgtaccgaagcattggagcagggtcgcattgcacgctctgagttcgccaccgatccttgcatgagcttgttcggccgtgtgatgtccgtctttaacccgaacccaacggacaatgcgagcattaatgtggcgcgcctggacgatcagtacgtggcgctgacggcgactccgctgccggtggcctttgatccggaaaccctggaaaccgccggtgtggttgagtatgacgacgatgttgacgtggacatgtctacgcctcacccgcaagtggagccgggtaccggccgtatgctgttccataccctgagctttggtcgtcaatgccaatacggtgtttacggcaccgaggccgagggcaagacccgtcgtccggtggcgaccttggacgttgatcgtccgagctatatgcatagcttcggcatgagcgaacgttatgttattctgagcgaatggccactggttgttaatccgaccgacctgctgctgcgtggccgtccattcattgagaatttcgagtggcagccggagcgtggcacccgctttcgtgtgctgcgcaaggcggacggtgccgaggtggcgacttgcgaggcggaggccgcttttggtttccatcacgttaatgcctttgagcgtgacggtgcggtggtgtgcgacgtggtcacgtatccggacgcttctgtcgtggaagagctgtccctggatcgtctgcgtagcgatgctccgagccgtggtagcggtcatctgcgtcgttatcgtctgcctctggacggcggcgcggcagcgagcaccctgcgcggcgaagagcgtattgagctgccgcgtattcatgatggtccggcgacgggtcgcccgtaccagtatgtctatggtgtcggtactcgtgcagcgggtcagtttaccgatcagctggtcaaaacggacgttccggcaggtactgcccaaacgtggcatgaagagggtacctacccgggtgagccggttttcgttgctgcaccggacggcgcgcgcgaggacgatggcgtcgtcctgagcgtggtgctggacccagatgcccagcagtccttcctgctggtcctggatgcaccgagcttcacggaacgtgctcgtgcggcggtcccacatccaattccgttcggctttcacggtcaattctttgactag

SEQ ID NO: 185 - protein, 169 aa, Artificial sequence
  source: /note="Description of Artificial Sequence: Engineered sequence derived from Picrophilus torridus; codons optimized for expression in Escherichia coli"
MIIQYLYYAAGIVSGLIGMEFIARLTHKYLMHGILWPIHKDHHIPSGRRFQRNNLFALFFAFISMSLFIASFETKDFIYMSFGIGMLFYGILYLIIHDMIIHNYYLHLRNRKHSRYINKLIEVHELHHINDGRGKGMNWGFLLYIPGIDKTRADLERINSKKNLDTLKQ

SEQ ID NO: 186 - DNA, 510 bp, Artificial sequence
  source: /note="Description of Artificial Sequence: Engineered sequence derived from Picrophilus torridus; codons optimized for expression in Escherichia coli"
atgattattcagtacttgtactatgcggccggcatcgtcagcggtctgattggtatggaatttattgcccgcctgacccacaaatatctgatgcacggcattctgtggccgatccacaaggaccaccacatcccatctggccgccgcttccagcgtaataacctgttcgcactgttctttgctttcattagcatgagcctgtttatcgctagcttcgaaacgaaagacttcatctatatgagcttcggcattggtatgttgttctatggtattctgtatctgatcattcatgatatgatcatccataactactacctgcacctgcgtaaccgcaaacatagccgctacatcaacaagctgattgaggtgcacgagctgcatcacatcaacgacggtcgtggtaaaggcatgaattggggttttctgctgtatattccgggtatcgacaaaacgcgcgcggacctggaacgtatcaactccaagaagaacctggatacgctgaagcaataa

SEQ ID NO: 187 - protein, 283 aa, Artificial sequence
  source: /note="Description of Artificial Sequence: Engineered sequence; codons optimized for expression in Escherichia coli"
MVAGMLTMTSLDLVALAAVVLIGLPHGALDGAIAMHLGYANKILNFISFIVLYVLMAGLVVALWIVMPAPCLLAFLIISMIHFGSGDARHGTGWMRGAEIMAHGGLVVAGISQMHRTEVDVVFGYLVGGDTTFVWSGLDIITVFVGVSIIVFVSQALWFRKWRSTAVELALLATLFAVVPPLVGFAVYFCLVHSARHVAGIVSNLRRYMSVASLCVQTLAFTLASWLAGVAAVWWLADMTNPEPTVLRVIFIGLAALTVPHMILVDGFYRRSSKSLKRRFISR

SEQ ID NO: 188 - DNA, 852 bp, Artificial sequence
  source: /note="Description of Artificial Sequence: Engineered sequence; codons optimized for expression in Escherichia coli"
atggtcgcaggtatgctgactatgacgtccctggacttggtcgccctggcggcggtcgttctgattggcctgccgcatggcgccctggatggcgcgatcgctatgcatttgggctacgcgaataaaatcctgaactttatcagctttatcgttctgtacgtgttgatggctggcctggtggttgcgctgtggatcgttatgcctgcgccgtgcctgctggcatttctgattattagcatgatccattttggtagcggtgatgctcgtcatggcacgggttggatgcgcggtgcggagattatggcccacggtggtctggttgtcgcgggcattagccagatgcatcgcaccgaggttgacgtcgtgttcggttacctggtcggtggtgacaccacgtttgtgtggagcggcctggatattatcacggtgttcgtgggtgtgagcatcatcgtctttgttagccaagctctgtggtttcgcaagtggcgttccaccgctgtcgagctggcgttgctggccacgttgtttgcggtggtcccgcctctggtgggctttgccgtgtacttctgtttggtgcatagcgcccgccatgtggcaggtatcgtcagcaacctgcgtcgctacatgagcgtggcatctctgtgtgttcaaaccttggcgtttacgctggcgagctggctggccggcgtggctgcggtgtggtggctggcagatatgacgaacccggaaccgacggtcctgcgcgtgattttcattggtctggcagcgctgaccgttccgcacatgatcctggtcgacggtttctaccgccgttctagcaagagcctgaagcgccgtttcattagccgctaa

SEQ ID NO: 189 - protein, 309 aa, Artificial sequence
  source: /note="Description of Artificial Sequence: Engineered sequence; codons optimized for expression in Escherichia coli"
MAVSAWADAPDGRWITAPHGGGPVMGVMSAIGAMPPVDLIALAAVAVIGLPHGALDGAIAMHLGFVRKPLNFIWFLCLYMAMAGLVIGVWMVAPAVSLLLFLLISMLHFGAGDARHGSGWLRTTEIIAHGGLVVVGISQLHHSEVDIIFGYLTGGDTSLVWQGLGFMTVIVGAAVVICIGQGLWHRRWRGSALELVALGVLFAMTPPLVGFAIYFCLVHSARHVAGIIGSLRREMSRFALVNQAACLTVASWAAGGLALWWFADQGNPEPMLMRVIFIGLAALTVPHMILVDGIYRRTTPSLKRQFMNR

SEQ ID NO: 190 - DNA, 930 bp, Artificial sequence
  source: /note="Description of Artificial Sequence: Engineered sequence; codons optimized for expression in Escherichia coli"
atggcagtttccgcatgggcggatgcaccggacggccgctggattacggccccgcatggcggcggcccggttatgggcgttatgtcggcgattggtgcgatgccgcctgttgatctgattgcactggcggccgttgcagttattggcctgccgcatggtgcactggatggtgcaatcgcgatgcacctgggttttgttcgtaaaccgttgaactttatttggtttctgtgtctgtacatggcgatggcgggtctggtcattggtgtttggatggtcgcgccagcggtcagcctgctgctgttcctgctgatttccatgttgcatttcggtgccggcgacgcacgccacggcagcggttggctgcgcaccacggaaatcatcgcccacggcggcctggtggtggtgggtatcagccagttgcatcacagcgaggttgacatcattttcggttacctgaccggcggcgatacctccctggtctggcagggtctgggtttcatgactgtgattgtgggtgcggcggtggttatctgcattggtcagggtctgtggcaccgtcgctggcgtggctccgctctggaactggtggctctgggcgtcctgttcgccatgaccccgcctctggttggtttcgcaatctatttctgcttggtgcactctgcgcgccacgttgcgggcatcattggcagcttgcgtcgtgaaatgagccgtttcgcactggtgaaccaggcggcgtgtctgaccgtcgctagctgggcggctggtggtctggcgctgtggtggtttgcagaccaaggtaacccggagccgatgctgatgcgtgttattttcattggcctggcggctctgactgtcccacacatgatcttggtcgacggtatttatcgtcgtaccactcctagcctgaagcgtcagtttatgaaccgctaa

SEQ ID NO: 191 - protein, 276 aa, Artificial sequence
  source: /note="Description of Artificial Sequence: Engineered sequence; codons optimized for expression in Escherichia coli"
MAPLDLAALAAIVLIGLPHGALDGAIAIHLGFTRKILHFIWFLALYIAMAGVVVAAWLLAPTACLLGFLIISMLHFGAGDARHGTGWLRSAEILAHGGLVIVGISQMHHVEVDVIFGYLTGRDTALLWQGIDVLTLIVGMAVVVCLAQALWHRRWRGTAFELGALAVLFALTPPLVGFAVYFCCVHSARHVYGIVNSLRREISRFSLLNQAAAFSVASWVAGGAAILWFADMSNPEPFVLRVVFIGLAALTVPHMILVDGFFRRSGRTLKRQFISR

SEQ ID NO: 192 - DNA, 831 bp, Artificial sequence
  source: /note="Description of Artificial Sequence: Engineered sequence; codons optimized for expression in Escherichia coli"
atggcgccgctggatctggcggccttggccgcaatcgtgttgatcggcctgccgcacggcgcgctggatggtgccatcgccatccatctgggcttcacgcgtaaaatcttgcattttatctggttcctggcgttgtatattgcaatggcgggtgtcgttgtcgcggcatggttgctggcaccgactgcgtgcctgctgggctttctgatcatctccatgctgcatttcggcgctggtgatgcacgtcacggtaccggttggctgcgtagcgcagaaattctggcacatggtggcctggttatcgtgggtatcagccagatgcaccatgtcgaggttgacgtgattttcggctacctgacgggtcgtgacaccgcgctgctgtggcaaggtatcgacgttctgacgctgattgtgggtatggcggtcgtggtgtgtctggctcaggcactgtggcatcgtcgttggcgtggtacggcattcgaactgggtgccctggcggtgctgtttgctctgaccccgccgctggtcggtttcgcggtctacttttgctgcgttcattctgcacgccacgtctacggtattgttaatagcctgcgtcgcgagatcagccgtttcagcctgctgaatcaggccgccgcctttagcgtggcatcctgggtcgctggtggcgcggcaattctgtggtttgccgacatgagcaatccggaaccattcgttttgcgtgtcgtctttattggtttggcggcgctgacggtcccgcacatgattctggtggacggcttctttcgccgctccggtcgtaccttgaagcgtcaattcatcagccgctaa

SEQ ID NO: 193 - protein, 286 aa, Artificial sequence; identical to SEQ ID NO: 6
  source: /note="Description of Artificial Sequence: Engineered sequence; codons optimized for expression in Escherichia coli"

SEQ ID NO: 194 - DNA, 861 bp, Artificial sequence
  source: /note="Description of Artificial Sequence: Engineered sequence; codons optimized for expression in Escherichia coli"
atgatcgacattctgagcgtgactgacctgtttgctctggcagcagtgatgctgattggtctgccgcatggtgcatttgacggcgcactggcgttctgcctgggtttcggccgtagcccaggcaaaattatcggctttctggtcatgtacctgctgctggcgggtctgtcggcgctgatctggttggtcagcccggtctttgccttggcgggcttcttggtgctgaccattgtccactttggtagcggcgacacggagcacctgtttcaaccgggcccgcgcgtggttcagcgctccctgaaggcatgtcaaattttggtccacggcggtatggtgaccatcctgctgccggtgttccatacgaccgaggtttcccaattgttcatcgttctggcaggtccgaacgcagttctgatcattgacgctctgcgtccggcgctgaaaatttggctggccgccgcgtgcatttacgcgagcgcggccctgttcaaacgtcaatacgcagcagcggccggcgaactggcaggtttggcggttctggtttggttgctgccaccgttggctggctttgcagtttatttctgcatcgtccacagccgccgtcatttcacgtccatctggaaagcgatgcagctgttcgtttcgcgtcgttttatcctgatttccggtggcatcctgaccgcggcaagctgggcaatgggtgccggtctgtatttcagccagaccatgtctggcagctttagcccggacgaggcattcatccgtaccgtgtttatcctgctggccgctctgaccgttccgcacatgctgctggtggacacgatgtaccgtccgacgctgaagaaaattacccagccgtag

SEQ ID NO: 195 - protein, 245 aa, Artificial sequence
  source: /note="Description of Artificial Sequence: Engineered sequence derived from Picrophilus torridus; codons optimized for expression in Escherichia coli"
MDITHFYYFIILSFIFFPVLGISLTNEFKKVRNYRALLYAMLFTDPVYIVWDSLSVTYHVWTFNKKYITGIMVYNLPVEEILFFFVVPFSTFLIYESIDYIKNDSFISKTSRIKKIMFIIAILFILNAIYFYSYIYMLLASVFTAFIILLTLKIMPSLYRSSNYWLFIIIMYIPFIVFDHFLTSLPVFTYGVHAIINIRILSIPVEEFIYVYSLMNFYALFYNIYKKRSNKDELKFIVNYPLRIK

SEQ ID NO: 196 - DNA, 738 bp, Artificial sequence
  source: /note="Description of Artificial Sequence: Engineered sequence derived from Picrophilus torridus; codons optimized for expression in Escherichia coli"
atggatattacccatttctattacttcattatcctgagcttcattttctttccggtcctgggtattagcctgaccaacgagtttaagaaggtgcgtaattatcgcgccctgttgtacgcaatgctgtttaccgatccggtctatattgtctgggacagcctgagcgtgacctaccacgtttggactttcaataagaaatatattacgggcatcatggtctataatctgccggtcgaggaaattctgttcttcttcgttgttcctttcagcacgtttctgatctacgagagcatcgactacattaagaatgatagctttatcagcaaaacgagccgtattaagaagatcatgtttattattgcgattctgtttatcctgaacgcaatttacttctattcgtatatctacatgctgctggcaagcgtctttacggctttcatcatcctgctgacgctgaaaattatgccgagcctgtaccgtagcagcaattattggttgttcattattatcatgtacatcccgttcatcgtgttcgatcacttcctgacgagcctgccagttttcacctacggtgttcatgccatcatcaacatccgtatcttgtctattcctgtggaggagttcatttacgtgtacagcctgatgaacttctacgccctgttttacaatatttataagaaacgcagcaataaagatgagttgaagtttattgtgaactacccgctgcgcatcaaataa

SEQ ID NO: 197 - protein, 370 aa, Artificial sequence
  source: /note="Description of Artificial Sequence: Engineered sequence; codons optimized for expression in Escherichia coli"
MLPDTGMREIRILGDGCAALSLAARATELPSHKITLVRPEGAPPDSEHIWGFWGTDKTDIAGRIARASWSRWAIVTSEGRAEMSSQTRPYFALRRSDWTAHCRQAAMEAGVAVLDGCETEAAPAAHIFDSRPPRVPRGCMLQHFIGFEVRAPKPVFDPETVILMDFRVDQSQGMHFIYLLPFSATEALVESTLFSARTLEEDFYTNAIDSYLERYFGLTSFEILRRERGVIPLAKLPRRDPEIPGLGGNGGAIRPSSGYAFIFIQKQVSEAIESAKLTGRLVVKSPHRQIDLWMDAVLLSVLRHWPEHAPDLFMRMARALSGDEFARFLSGEAGWGLRLKVVMAMPKWPFIRATLRLVTGGRGMSPVEAA

SEQ ID NO: 198 - DNA, 1113 bp, Artificial sequence
  source: /note="Description of Artificial Sequence: Engineered sequence; codons optimized for expression in Escherichia coli"
atgctgccggacaccggcatgcgtgagatccgtatcctgggtgacggttgtgcggccctgagcttggcagctcgcgccaccgaactgccgagccacaaaattacgctggttcgtccggaaggtgcgccgccggatagcgagcacatctggggtttctggggcaccgacaagacggatattgcgggtcgcattgcgcgtgcgtcttggtcgcgttgggcgatcgttacctctgagggtcgtgccgagatgtcctcgcagacgcgtccgtactttgctctgcgccgtagcgattggacggcccattgccgtcaggcggcgatggaggccggtgtggcggttctggatggctgcgagactgaggcggcgccggcagcacatatctttgacagccgtccgccgcgcgttccgcgcggttgtatgctgcaacactttattggctttgaggtccgtgctccgaagccggtgtttgatccggaaactgtcattttgatggatttccgtgtggaccagagccagggcatgcacttcatttatctgctgccgttttctgcgacggaggcgctggttgaatctacgctgttcagcgctcgtaccctggaagaagatttctacacgaacgctatcgacagctacctggagcgctacttcggcttgaccagctttgaaatcctgcgccgtgaacgtggtgtgattcctctggccaaactgccacgtcgcgacccggagattccgggtttgggtggcaatggcggtgcaatccgtccttccagcggctacgcatttatctttatccaaaagcaggtgagcgaggcaattgaaagcgccaaactgactggtcgcttggttgttaaatctccacaccgtcagattgatctgtggatggatgccgttctgctgtctgtgctgcgccactggccggaacacgcaccggacttgttcatgcgtatggcacgtgctttgtctggtgacgaatttgcacgcttcttgtcgggtgaagccggctggggtttgcgtctgaaggttgttatggcgatgccgaagtggccgtttatccgtgcgacgctgcgcctggtcactggtggccgtggtatgagcccagtcgaggcggcctag

SEQ ID NO: 199 - protein, 376 aa, Artificial sequence
  source: /note="Description of Artificial Sequence: Engineered sequence; codons optimized for expression in Escherichia coli"
MLRETTERPQRLRVLGDGAAALSLAMRAGDLASHELTLVRPKGAPTPVDHIWGFWDGPDMPPAVSAACQLARASWDRWAIITADGGVVMQSGTRRYSALHRSAWTRHCETVAQQAGVRSVDEAELGDEGADLVFDSRPPPVPDGIMLQHFIGLEVRSNRPVFDAGTAILMDFRVDQSRGMHFIYLLPFSATEALVESTLFSPDRLEEQFYLDAIADYLGTHYGLHSFDTVRRERGVIPLARLKQRDPKIQGIGGNGGAIRPSSGYAFVFIQKQIDRAITEMRESGHFQVRTPHSAVDLWMDGVLLSVLRHWPERAPDLFLRMGRALDGDEFARFLSGEADWPLRLKVIMAMPKWPFLRGLMRLMAGGSPHHTAAAR

SEQ ID NO: 200 - DNA, 1131 bp, Artificial sequence
  source: /note="Description of Artificial Sequence: Engineered sequence; codons optimized for expression in Escherichia coli"
atgctgcgcgagactaccgaacgtccgcaacgtctgcgtgtcctgggcgatggtgcggctgcgctgagcctggccatgcgtgctggtgacctggcatctcatgaattgacgctggtgcgcccgaagggcgcgcctactccggttgatcatatttggggcttttgggatggtccggacatgccgccggccgttagcgcggcgtgtcaactggcacgtgcatcctgggaccgctgggcgattatcacggcggacggcggcgtcgtcatgcagtccggcacccgccgttatagcgcactgcatcgcagcgcgtggacgcgtcactgcgaaaccgttgctcagcaggcaggtgtccgttctgtggacgaagcggagctgggtgatgaaggtgcggatctggtgttcgacagccgtccaccgccggtcccggatggcatcatgctgcaacacttcattggtctggaagtccgtagcaatcgtccggtgtttgacgccggcacggcgatcctgatggacttccgcgtggatcagagccgtggcatgcatttcatttacctgctgccgttttccgcgaccgaagcgctggttgaaagcaccctgtttagcccggatcgtctggaggagcagttctatctggatgcgatcgccgattacctgggcactcattatggtctgcatagcttcgataccgttcgtcgtgaacgcggcgttatcccgctggcgcgcttgaaacaacgtgacccgaaaatccagggtattggtggtaatggtggtgcgattcgtccaagcagcggttatgcgtttgtgttcatccaaaagcagatcgaccgcgcaatcacggagatgcgtgagagcggtcatttccaagtgcgtacgccacatagcgcggttgatctgtggatggacggtgttctgctgagcgttttgcgtcactggccggaacgtgccccggatttgttcctgcgtatgggtcgcgccctggatggcgatgagttcgcacgttttctgagcggtgaggcagactggccgctgcgtttgaaagtcattatggctatgccgaagtggcctttcctgcgtggtctgatgcgtctgatggctggcggtagcccgcaccacaccgcggcggcgcgttga

SEQ ID NO: 201 - protein, 382 aa, Artificial sequence
  source: /note="Description of Artificial Sequence: Engineered sequence; codons optimized for expression in Escherichia coli"
MTTAFTQHCGGCPMSPDHAMRQVRVLGDGCAALSLAARANELAGHRLTLVRPRGAPQETDHIWGFWDGPNLAAASRLARKRWHSWSIVTRRGKAVLRSHERPYTALHRLDWTAHCREAARRAGVAILTGGEAATAADQVFDSRPPPVPDDIMLQHFLGLEVRSKRAIFDPDTAILMDFRVDQSRGMHFIYLLPFSATEALVESTLFTPSVCPKSYYRREIVAYLEAHFGLDEFETLRTERGVIPLGILPPRDPSIPGVGGNGGAIRPSSGYAFPFIQKQIDRAIAAACEGRELGFAMPHRRVDLWMDAVLLTVLRHWPEQAPELFLRMGRALDGDEFARFLSGEADLPLRLKVIMAMPKAPFLRGLVRLLAGSRPQRTAEAG

SEQ ID NO: 202 - DNA, 1149 bp, Artificial sequence
  source: /note="Description of Artificial Sequence: Engineered sequence; codons optimized for expression in Escherichia coli"
atgacgaccgcgttcacccagcactgtggtggttgcccgatgtccccggatcacgctatgcgccaggtccgtgtgctgggcgatggttgcgccgcactgtctttggcagcgcgcgcgaacgaactggcaggtcatcgtctgaccttggtccgtccgcgtggcgccccgcaagaaacggaccatatttggggtttctgggacggtccgaacctggcggcagcaagccgtctggcacgtaagcgttggcattcgtggtccattgtgacccgccgtggcaaggcggttttgcgcagccacgagcgcccgtacaccgccctgcaccgcctggattggaccgcgcactgccgcgaggctgcgcgccgcgcgggtgtggcaattctgactggtggtgaagctgcaacggcggcagaccaagttttcgattcccgcccgccgccagtgccggacgatattatgctgcaacatttcttgggcctggaggttcgttcgaaacgtgccattttcgatccagatactgctattctgatggacttccgcgttgatcagagccgcggtatgcactttatttatctgctgccgttctctgctaccgaagcactggtcgagagcaccttgttcacgccatccgtctgcccgaagagctactaccgccgtgagatcgttgcatacctggaagcgcattttggtctggacgaatttgagactctgcgtaccgaacgcggtgtgattccgctgggcatcctgccgcctcgtgatccgagcattcctggtgttggtggcaatggtggtgcaatccgcccgagcagcggttatgcctttccattcattcagaagcagattgatcgtgctatcgctgctgcctgcgagggtcgcgagctgggtttcgccatgccacaccgccgcgtcgatctgtggatggatgctgtcctgctgaccgtcttgcgccattggccggaacaggccccggagctgtttctgcgcatgggtcgcgcactggatggtgatgagttcgcgcgtttcctgtccggtgaagcggacctgcctctgcgcctgaaagtgatcatggcgatgccgaaagctccgtttctgcgtggtctggttcgcctgctggcgggttctcgtccgcaacgtaccgcggaagcgggttga

SEQ ID NO: 203 - protein, 376 aa, Artificial sequence; identical to SEQ ID NO: 7
  source: /note="Description of Artificial Sequence: Engineered sequence; codons optimized for expression in Escherichia coli"

SEQ ID NO: 204 - DNA, 1131 bp, Artificial sequence
  source: /note="Description of Artificial Sequence: Engineered sequence; codons optimized for expression in Escherichia coli"
atgattcgtacggcctccctggaacaaaccgagctggccattatcggcgcgggctgcgcgggtctgagcctggctcgccaactggttcgtaccgaaaagacctccattattaaggcgtgcctgtacggtccggtgagcccggcagcaaccaatcgtcatagctggggcttttgggctacgcaaggcctgaaagagcagacggagctgtctcgtcagcgttggcacaagtggcagatcattactgcggaacgtaaggtcacccagacggcggacagccacccatactgccgcctggacagccgtgattggctgacccactgcttgaatattatcgatggtaacattcagcagaagccggacaacctgccgactccaggcgcgcagccggttttcgactctcgtccgccgaatgtcccggagggtgcattgctgcaacactttaagggtgtggaaattaaggcagcccaaccgtgcttcagcccggacaccgcaattttgatggatttccgttgcgaccagagccgtggtattcactttatctatttgctgccgtactccccgaccgaggcgctggtggagagcaccatgctgagcccgaagcgtcaaaacgacgatttctacgccgaagcgattaagacgtatttggaaacctactgggcgacgggtggctggcaagttaaacacaccgagcaaggctgcattccgatggcctttgttcaaccggtgaatctggactacctgccaatcggtgcgaatggtggctgcgttcgtcctagctctggctacgcgttcgcttttattcagaagcacaccgacgcgattatcgaccgcctggtgctgagcggtaccgatccgctgacccctgcgacgatgcctcgcccgatcagccgttttgatctgttcttggaccgcatctttctgcatgttattcgccatcacccggagaaagcggcggagctgttcgcgcagattgcattggcactgaatggcgacgagttcgcccgtttcatgtctggtctggcggactttaagatctacgcgaagctgatcacggcgatgccggcgggcctgttcctgcatgcgctgtggaatatccacgttaccaatcgtgataacgctgacaagaagtga

SEQ ID NO: 205 - protein, 536 aa, Artificial sequence
  source: /note="Description of Artificial Sequence: Engineered sequence derived from Salinibacter ruber; codons optimized for expression in Escherichia coli"
MSWLTRLAHRDDATLNTRTEPAPAGPDAPHAVVVGAGMGGLASAVRLRARGFRVTLLDRLDQPGGRARVFEQDGFTFDAGPTVITAPFLFEELWSLCGRDLEDDVELVPVDPFYRIRFDDGTAFNYTGDTDEMVEEIRRFAPEDVDGYRRFLEKSEEIFEVGFEELGHVPFDNVTDMLRIVPAMMKLESHRTVHSLVSKYISHPKIRKVLSFHPLLVGGNPFSTTSIYTLIAHLERKWGVWYAMGGTGSLVQGLSDLLADLDVTQRYGAEVDQILVEDETASGVRLSSGEGIPADLVVSNADVGWTYRHLVAPEHRDTWTDRKVEDMDYSMSLFVWYFGTDRTYEDVEHHSILLGPRYKGLLDDIFDHKELADDFSLYLHRPTKTDPSMAPDGHDAFYVLSPVPHLESGVDWRQQAEPYRQAVEEYLADTVLPDLGEHLVTSRMLTPREFKTDYKSLKGAAFSVEPKLTQSAWFRPHNQSEDVDHLYFAGAGTHPGAGLPGVLSSARVLDTIVPAPDAFDVSVPQNGAGAHPEPVA

SEQ ID NO: 206 - DNA, 1611 bp, Artificial sequence
  source: /note="Description of Artificial Sequence: Engineered sequence derived from Salinibacter ruber; codons optimized for expression in Escherichia coli"
atgagctggctgacccgtctggcgcaccgcgacgacgctaccctgaacacgcgtaccgaaccagcgcctgcgggcccggacgcgccgcacgcggtcgtcgtgggtgcgggtatgggtggcttggctagcgcagtccgtctgcgtgctcgtggctttcgtgttaccctgctggaccgtctggatcagcctggtggccgcgctcgcgttttcgaacaggacggtttcacgttcgatgctggtccgaccgttattaccgccccgttcctgtttgaggagctgtggagcctgtgcggtcgtgatctggaggatgatgtggagctggtccctgtggacccgttctaccgtatccgttttgacgacggtaccgcgttcaactacacgggcgacaccgacgaaatggttgaagagattcgtcgtttcgccccggaggacgtggacggctaccgtcgtttcctggagaaaagcgaagagatctttgaggtgggtttcgaggagctgggtcacgtgccttttgataacgttactgacatgctgcgtattgttccagccatgatgaaattggagagccatcgtactgtgcatagcttggtcagcaagtatattagccatccgaagatccgtaaagttttgagctttcatccgctgctggtgggtggtaacccgttcagcaccacgagcatctacacgctgatcgcgcatctggagcgtaaatggggtgtttggtatgcaatgggtggtaccggtagcctggttcagggtctgagcgatctgctggctgatttggacgttacccagcgctatggcgcagaggttgaccagatcctggtggaagatgaaacggcgagcggcgtgcgtctgtcgagcggcgagggcatcccggcggacctggtggttagcaatgcggatgtgggctggacctaccgtcatctggtggcaccggagcatcgtgatacttggacggaccgtaaagtggaagatatggattacagcatgagcctgttcgtgtggtattttggtaccgaccgcacgtatgaggatgttgaacatcattcgatcctgctgggcccacgttacaaaggtctgctggacgacatctttgaccataaagagctggcagacgatttcagcctgtatctgcaccgtccgaccaagactgatccgagcatggcgccggacggccatgacgcgttttatgtcctgagcccggttccgcacctggaaagcggcgtcgattggcgtcagcaagctgaaccgtaccgtcaagcggtcgaggaatacctggcagataccgtcctgccggatctgggtgagcatctggttacgagccgtatgctgaccccgcgcgagttcaaaaccgattacaaatccttgaaaggcgcggcattcagcgtcgaaccgaagttgacgcaaagcgcgtggttccgcccgcacaatcagagcgaggatgtggaccacctgtacttcgcgggtgccggtacccatccgggtgcgggcctgccgggtgtgctgagcagcgcacgcgttttggatacgatcgtgccggctcctgatgcatttgacgtgtctgttccgcagaatggtgccggcgcgcatccggagccggtggcgtaa

SEQ ID NO: 207 - protein, 493 aa, Artificial sequence
  source: /note="Description of Artificial Sequence: Engineered sequence derived from Picrophilus torridus; codons optimized for expression in Escherichia coli"
MKIVIVGGGYAGLSLANLVARDNDVILIEKNKTLGGRSRSFYADGYKFDMGPSWYLMPEVFEHYFQSLGLSRHDFYSIKRLDPAFRICIENSCYNIRADPYNNMNLFNSLEDDGYKKFDLYLEETKKIYDAVFPDFIYRDFSSFKDMLSPDILKNVSKLHLLDSMMDLSRSFFSSKSMRYITTFSSVFLGGNPFNIPAFYSMVNYSMFNDGVYYPENGFSSVVSSLYKIGRSLNVRYITSCEVGGININNNEISSIMAGNNKIDGDLFIFAGDYYNAESMLPPGFRNYSESFWKTRRLSPSAVLAYIGLKKKLAIEHHNIIIPAEWNDHFNSIDSGSKYIPENFSFYLSVRSKTDKNAAPENMDSIFMLIPASPFIIDTEFYRSRYVFAALSKLEEYLNENIIDYIDFIKYYGPSDFKSDYNSFMGTAFGLANTMLQTAYFRPLNRNRLLRNMYYTGQYTHPGIGVPMAFVSAEVIYNKLIKEKVKSTGEITM

SEQ ID NO: 208 - DNA, 1482 bp, Artificial sequence
  source: /note="Description of Artificial Sequence: Engineered sequence derived from Picrophilus torridus; codons optimized for expression in Escherichia coli"
atgaaaatcgttattgttggtggcggctatgcaggcctgtccctggcgaatttggttgcacgcgataacgacgtcattttgatcgagaagaacaagaccctgggtggccgttcgcgcagcttttacgcggacggttataaatttgacatgggtcctagctggtacctgatgccggaagttttcgagcattacttccaaagcctgggcctgtctcgtcatgacttttattcgattaaacgtctggacccggcgttccgtatctgtattgaaaacagctgctataacattcgtgccgacccgtacaacaacatgaacttgttcaattcgctggaggacgatggttacaagaaattcgatctgtatttggaggagactaagaagatttacgacgctgtctttccggattttatttatcgtgattttagcagcttcaaggatatgctgtcgccagacattctgaagaatgttagcaagttgcacctgttggattccatgatggatttgagccgttcgttcttttcttccaagagcatgcgttatatcacgaccttttcttctgtgtttctgggtggtaacccgttcaatatccctgcgttctacagcatggttaattactccatgttcaatgatggcgtttactatcctgaaaacggcttttccagcgttgtgagcagcttgtacaaaatcggccgttccctgaacgtccgctacattacgagctgtgaggtcggcggtatcaatatcaataacaatgagattagcagcatcatggcgggcaataacaagatcgatggtgacctgttcatctttgcgggtgattactataatgcggagagcatgctgccgcctggttttcgtaattattctgagagcttttggaaaacccgccgtctgagcccgagcgctgtgctggcctacatcggtctgaagaagaaactggcaatcgagcaccacaacatcatcatcccggcggagtggaatgaccattttaactccatcgatagcggtagcaaatacattccggagaattttagcttttacttgagcgtccgtagcaagaccgacaagaacgcagcgccggagaacatggatagcatctttatgctgatcccggcgtccccgtttatcatcgataccgagttctaccgttctcgctacgtctttgccgcactgagcaaactggaggaatacctgaatgagaatatcattgattatattgattttatcaagtactatggtccatccgatttcaagagcgactacaattccttcatgggtacggcatttggcctggctaatacgatgttgcaaaccgcatacttccgtccgctgaaccgtaatcgtctgctgcgtaatatgtactacactggtcagtatactcatccgggtattggcgtgccgatggccttcgtttccgcagaggttatttataacaagctgatcaaggagaaagttaagagcacgggtgagattactatgtaa

SEQ ID NO: 209 - protein, 514 aa, Artificial sequence
  source: /note="Description of Artificial Sequence: Engineered sequence derived from Thermosynechococcus elongatus; codons optimized for expression in Escherichia coli"
MAKHVVVIGGGIGGLTTAALLARRGYRVQLFEQAAQLGGCASTFQRRGFTFDVGATQVAGLEPGGIHAQIFAELEMPLPPATPCDPACAVYLPQETTPIHVWRDRDRWRLERQRHFPGSERFWQGLEQLFAISWRFQQRQPILPPRNGFDLWQLVQALRPDTLLTVPFSLMTVTDWLNLCGLGSDRRLRQFLDLQLKLYSQVDASETALLYAATALCLSQEPHGLYHLHGSMQVLSDLLANALRRDGGQIYTRHRVHDIAVEGGRAVAVQVENLKTKTLERVEADHIVANVPAQNLPQLLGDALPPGYARRLKRLPPASGAFVLYLGVKEAAIPEVCPPHLQFLYDPQGPIGENNSLFVSVSQPQDGRAPQGYRTLIASSFTEPNFWRQPDLDYTATKAQYTQTALERLGEFFDLRPEYIVHCEAATPRTFWRYTARIDGIVGGISQRLSTFGPFGLASRTPIPHLWLVGDSVHPGEGTAGVSYGARALVQQVVASDSNFGKSHYNRGTLRLIN

SEQ ID NO: 210 - DNA, 1545 bp, Artificial sequence
  source: /note="Description of Artificial Sequence: Engineered sequence derived from Thermosynechococcus elongatus; codons optimized for expression in Escherichia coli"
atggcgaaacacgtcgtcgtcatcggtggcggcatcggtggtctgaccactgcagctctgctggcccgtcgcggttatcgtgtccagttgtttgagcaggccgcgcaactgggcggctgcgcgagcacgttccagcgccgtggtttcacgtttgatgttggcgcgacgcaagttgctggcctggaaccaggtggtatccacgctcagatctttgcggagctggaaatgccgctgccacctgcgacgccttgcgatccggcttgtgcagtgtacctgcctcaggaaacgaccccgattcacgtgtggcgtgatcgtgaccgctggcgcctggaacgccagcgtcacttcccgggtagcgaacgcttttggcagggtttggaacaactgttcgcgatttcttggcgttttcaacagcgtcagccgatcctgccaccgcgtaacggcttcgacttgtggcagctggtgcaagcattgcgtccggatacgttgctgacggtgccgttctcgctgatgactgtgaccgattggctgaacctgtgtggtctgggcagcgaccgccgtttgcgtcaattcctggatctgcagctgaagctgtactcgcaggttgatgccagcgagactgcactgctgtatgctgcaaccgcgttgtgtctgtcccaagagccgcatggtttgtatcacctgcacggtagcatgcaggtcttgagcgacctgctggcgaatgcgctgcgccgtgacggcggtcaaatttacacccgtcaccgtgtccacgacatcgcggtggagggcggtcgcgcggtcgccgtgcaagtcgaaaatttgaaaaccaaaaccttggagcgcgttgaggctgaccacatcgttgctaacgttccggcgcagaatctgccgcaactgttgggtgatgcactgccgccaggttatgcccgtcgtctgaaacgtttgccgccggcgtccggtgcattcgttttgtacctgggtgtcaaagaggccgcaattccggaggtttgcccgccgcacctgcagtttctgtatgatccgcagggtccgattggtgagaataattcgctgtttgtgagcgtgtcgcaaccgcaggatggtcgtgcaccgcaaggctaccgtaccctgatcgcatccagcttcactgagccgaatttctggcgtcaaccggatctggattacacggccaccaaggcccagtacacccaaaccgcgctggagcgcttgggtgagttctttgacctgcgtccagagtatatcgtgcactgcgaagcggctaccccgcgcaccttctggcgttatacggcgcgcattgacggcattgttggcggtattagccagcgtctgagcaccttcggcccgttcggtctggccagccgtacgccgatccctcacctgtggttggtcggtgactcggttcatccgggtgaaggcaccgccggtgtgagctatggtgcccgcgcgttggttcaacaggttgttgcatccgattcgaactttggcaaatctcactacaaccgtggcacgctgcgcctgattaactga

SEQ ID NO: 211 - protein, 465 aa, Artificial sequence
  source: /note="Description of Artificial Sequence: Engineered sequence derived from Pyrobaculum arsenaticum; codons optimized for expression in Escherichia coli"
MRAIVIGGGFGGLASAALLAKRGYEVVLVEKNCRLGGRSVLYDIRGHRVEIGPTWYLMDDVIDKVLGEIGGRTYEVAELNPSMMFVDRRHGKIEVGRDLPQRLEELEQGAGDRSVELMREAGRLYQVVVEHMLLRKYETWLDMLSAAKAGAGFAKYLVTSFGSLVERRFKSPLIQRLLEYDIMFLGSPPRELPALYGLLLNYSVFVRGVKAPKGGFAAVIRNLIEAGARLGVDFRTCTAARRILVEGGKVRGVETASGVLESDVVVINADYKRGEELLEPRYRSYGEAYWGRVKMAPSAYMALLSGDRWEGPPHLIYISEWERHLSALTGGGDMPQLPSFYLHVPSVVEPDWAPPGRSSMFILVPSPPGVDYWPRGLAEKLAAEATGGSAETLAEFPSRFFCDYYGAYQCTALGPRHTLRQTALGRPLMRGRMVRGLYFVGQYTHSGIGVPSVLASAYILARYYV

SEQ ID NO: 212 - DNA, 1398 bp, Artificial sequence
  source: /note="Description of Artificial Sequence: Engineered sequence derived from Pyrobaculum arsenaticum; codons optimized for expression in Escherichia coli"
atgcgcgccattgtgattggcggtggtttcggtggcctggcgagcgccgcactgctggctaaacgtggttatgaggtggtgctggttgagaagaactgtcgtctgggcggtcgcagcgttctgtacgatattcgtggtcatcgcgtggagattggtccgacctggtatctgatggacgacgtgatcgacaaggttctgggtgagatcggtggtcgtacctatgaggttgcggagctgaacccgagcatgatgttcgttgatcgtcgtcacggtaagattgaagtgggtcgtgacctgccgcagcgcctggaggaattggaacagggtgcgggtgatcgcagcgtggagttgatgcgcgaggcaggtcgcttgtatcaggtcgttgtggagcacatgctgctgcgtaagtatgaaacttggctggacatgctgagcgcggcaaaggccggtgccggctttgcaaaatacctggtgacgagctttggtagcctggtggaacgtcgcttcaagagcccactgattcaacgtctgctggagtacgatatcatgtttctgggtagccctccgcgtgagctgccggcgctgtatggtctgctgttgaactacagcgtgtttgtgcgtggtgtcaaggccccaaaaggtggttttgcggcggtcattcgtaatctgatcgaggctggcgcacgtttgggcgttgatttccgtacgtgcacggcggcacgccgtatcctggttgaaggtggcaaggtccgcggtgttgaaaccgcgtccggcgtcttggaatccgatgttgtcgttattaacgccgactacaaacgtggtgaagagctgctggagccgcgttatcgtagctatggtgaagcgtactggggtcgtgttaaaatggcaccgagcgcgtacatggcgttgttgagcggtgaccgttgggagggtccgccgcatctgatttacattagcgagtgggaacgtcacctgagcgcattgaccggtggtggtgatatgccgcagttgccgagcttctacctgcacgtgccgagcgtggtggagcctgactgggcaccgccgggtcgttccagcatgttcatcctggtcccgtcgccaccgggcgtggattattggccgcgtggtttggcggagaagctggcggcagaggcaacgggcggcagcgccgaaaccctggctgagttcccgagccgcttcttttgtgattactacggcgcatatcaatgcaccgcgttgggtccgcgtcatacgctgcgtcaaaccgccctgggtcgcccgctgatgcgcggccgtatggtgcgcggtttgtacttcgtcggccagtacacccacagcggtatcggtgttccatcggtgctggcaagcgcatacattctggcacgctattatgtgtaa

SEQ ID NO: 213 - protein, 517 aa, Artificial sequence
  source: /note="Description of Artificial Sequence: Engineered sequence; codons optimized for expression in Escherichia coli"
MTPAKQAQADIADNSADRSDVLVIGAGFGGIAAALRMRARGYSVTLVDRLQAIGGRAQVFERGGFRHDAGPTVITAPFLFDELFELFGEKREDHLDFRPLDPWYRFHFDDGSQFDYRATVKDTNREIERFSPADVKGYAGLLETSKRIFEVGFEKLADRPFTRFTSMMAQVPALLRLRSYRTVAGLVNSHIKHPLLRQAFSIHPLLVGGNPFTTTSIYALIHYLERRWGVFFCMGGTGRLVEQLHRLLERAGVQVELGVDIESITTSGGLASGATAIDGRHFPADRVICNGDPPTVYQQMMPGEARSKRALPEAATQYSMGLYVLFFGTKRTYEDVAHHTIWMGPRYRELLADIFDRKILADDFSLYLHRPTATDESFAPEGCDSFYVLCPVPNLLGDVDWSVEGRKLRDRIVAALERTIMPGLGESITDDFWMTPEDFLNDYRSMHGAGFSIAPIFIQSAWFRYHNRDPHIPNLYFAAAGAHPGAGMPGVLCSAKVVERLIEEEEQAGARHLARSA

SEQ ID NO: 214 - DNA, 1554 bp, Artificial sequence
  source: /note="Description of Artificial Sequence: Engineered sequence; codons optimized for expression in Escherichia coli"
atgacccctgcaaagcaagcacaagcggatattgcggataacagcgcagatcgtagcgacgttctggttattggcgcgggttttggcggtattgccgctgccctgcgtatgcgtgcgcgtggttacagcgttaccctggtggatcgcctgcaagcgatcggtggtcgtgcacaggtgtttgagcgtggtggtttccgtcacgacgccggtccgaccgttatcaccgcaccgttcttgttcgacgaactgtttgagctgtttggcgagaaacgcgaagatcacctggatttccgtccgctggacccgtggtatcgtttccatttcgatgacggctcccagtttgattatcgtgcaacggtcaaggacacgaatcgtgagatcgagcgtttcagcccggcggacgtgaagggctacgcgggtctgttggaaacgagcaagcgtatcttcgaagtcggcttcgaaaagctggcagaccgtccgtttacgcgttttacctccatgatggcgcaagtgccagcattgctgcgtttgcgctcttaccgcactgtcgcgggcttggttaacagccacatcaagcatccgttgctgcgtcaggcgttcagcattcacccgctgttggtgggcggtaatccgttcaccaccacgtccatttacgccctgattcactacctggagcgccgttggggtgtgttcttttgcatgggtggtaccggtcgtttggtcgaacaattgcaccgtctgctggaacgcgcgggtgttcaggtggagctgggcgtggatatcgaaagcattaccaccagcggcggcttggcgagcggtgcgacggccatcgacggtcgtcactttccggcggatcgtgtgatttgtaacggtgaccctccgacggtgtatcagcagatgatgccgggtgaggcgcgctccaagcgtgcgctgcctgaagcggcgactcaatactcgatgggcctgtacgtgttgttctttggcactaaacgtacgtatgaggatgtggcacaccataccatctggatgggtccgcgctaccgtgagttgctggccgatattttcgaccgtaagattctggcagatgactttagcctgtacttgcaccgcccgacggcaactgatgaatcctttgcgccggagggttgcgatagcttttacgtcttgtgcccggttccgaatctgctgggtgatgtggattggtctgtcgaaggtcgcaagctgcgcgatcgtatcgttgcggcattggagcgtacgatcatgccgggtctgggtgaatccatcacggacgacttttggatgaccccggaggactttctgaatgactatcgtagcatgcacggtgctggcttttccatcgcgcctatctttatccagagcgcctggttccgttaccacaatcgtgacccgcatatcccgaacctgtactttgcggcggcaggcgcccacccgggcgctggtatgccaggtgtcctgtgctctgcgaaagttgtcgaacgtttgattgaggaggaagaacaggccggtgcccgccacctggctcgcagcgcgtaa

SEQ ID NO: 215 - protein, 520 aa, Artificial sequence
  source: /note="Description of Artificial Sequence: Engineered sequence; codons optimized for expression in Escherichia coli"
MNPAPTASSSSADTSSVITSDVLVIGAGFGGIAAALRMRARGHSVTLVDRLQAIGGRAQVFERGGYRHDAGPTVITAPFLFDELFELFGERREDHLDFQPLDPWYRFHFDDGSQFDYRATVEDTNDEIRRFSPRDVAGYARLLETSRRIFEVGFEKLADKPFTRFTAMLAQVPSLLKLRSYRTVAGLVNSHIKHPLLRQAFSIHPLLVGGNPFTTTSIYALIHYLERRWGVFFCMGGTGKLVAELHRLLERSGVRVELGTDIAQITLAGGRATGAVSTDGRQFTAERVICNGDPPTVYQQMLPGESRSKRALPESATTYSMGLYVLFFGTKRKYEDVAHHTIWMGPRYRELLADIFDRKILADDFSLYLHRPTATDDSFAPDGCDSFYVLCPVPNLLGDVDWQKEGPNLRDRIVAALDKTIMPGLSESISDDFWMTPEDFKADYRSMHGAGFSIAPIFIQSAWFRYHNRDPHIPNLYFSAAGAHPGAGMPGVLCSAKVVERLIEEEDQALAASRSLARSA

SEQ ID NO: 216 - DNA, 1563 bp, Artificial sequence
  source: /note="Description of Artificial Sequence: Engineered sequence; codons optimized for expression in Escherichia coli"
atgaacccggcgccgacggcgagcagcagcagcgcggacacctccagcgttattacttccgatgtcctggtcattggtgcgggctttggtggtattgcggcagccttgcgtatgcgcgcgcgtggtcacagcgtgacgctggttgaccgtttgcaagcaatcggtggtcgtgctcaagttttcgagcgtggcggttatcgtcacgacgcgggcccaacggttatcaccgcaccgttcctgttcgatgaactgttcgagctgttcggtgaacgccgtgaggaccatctggacttccaaccgctggacccgtggtaccgtttccactttgatgatggcagccaattcgattaccgcgcaacggttgaggacaccaacgacgagattcgtcgcttttctccgcgtgatgtcgcgggttacgcacgtttgctggaaacttctcgccgtatctttgaggttggtttcgagaaactggcggataagccgtttacccgtttcaccgcgatgctggcgcaggtcccgagcctgctgaagttgcgcagctaccgtaccgttgcgggtttggtgaacagccatatcaaacacccgctgttgcgccaggcgtttagcattcatccactgttggtgggtggtaatccgtttacgaccacgtctatttatgcgctgatccactacctggaacgccgttggggtgttttcttttgtatgggtggcacgggcaaactggttgcggagctgcaccgcttgctggaacgcagcggtgttcgcgttgagttgggcactgatatcgcacaaatcaccctggcgggtggtcgcgcaaccggtgctgtcagcaccgatggccgccaattcaccgcggagcgtgtcatttgcaatggcgatccgccgaccgtgtaccaacaaatgctgccgggtgagagccgttcgaaacgtgccctgccggagtccgccacgacttatagcatgggtctgtacgtgctgttctttggtacgaagcgtaaatatgaggacgttgctcaccatacgatctggatgggtccgcgttatcgtgaactgttggcggatattttcgaccgtaaaatcctggcggatgattttagcctgtacctgcatcgtccaaccgccaccgatgacagctttgcgccggacggctgcgacagcttttatgtcctgtgcccggtcccgaatctgctgggtgatgtcgactggcaaaaggaaggcccgaacttgcgtgatcgtattgttgcggcgctggataaaactatcatgccgggcttgagcgagtctatcagcgacgacttctggatgactccggaagatttcaaagcggattaccgcagcatgcatggtgccggtttcagcattgctccgatctttattcagagcgcatggtttcgctatcacaatcgtgatccgcacattccgaatctgtacttcagcgcagctggtgcacacccgggcgcaggtatgccgggcgttctgtgcagcgccaaggtcgtcgaacgcctgattgaagaggaggaccaagctctggcggcatcccgctctctggctcgtagcgcataa

SEQ ID NO: 217 - protein, 524 aa, Artificial sequence
  source: /note="Description of Artificial Sequence: Engineered sequence; codons optimized for expression in Escherichia coli"
MAPAPSAIQDLAAPHSKTGPADQSDVLVIGAGFGGIAAALRMRARGYSVTLVDRLDAIGGRAQVFERGGFRHDAGPTVITAPFLFDELFELFRERRENHLDFRPLDPWYRFHFHDGNQFDYRATVEDTNAEIERFSPRDVAGYAGLLEASRQIFEVGFEKLADRPFTRFMTMMAQVPSLLRLRSYHTVASLVNRHIKHPLLRQAFSIHPLLVGGNPFTTTSIYTLIHYLERRWGVFFCMGGTGKLVEELHRLLERAGVNVELGVDIERITMKGGRATGAESTAGRRYIADRVICNGDPPTVYQQMLPNETRSKRAIPEAATKYSMGLYVMFFGTRKQYPDVAHHTIWMGPRYRELLADIFDRKILADDFSLYLHRPTATDSSFAPDGCDSFYVLCPVPNLLGDVDWEFEGPRLRDRIVAALEETIMPGLGASITDDFWMTPEDFKRDYRSMHGAGFSIAPIFTQSAWFRYHNRDPHIPNLYFSAAGAHPGAGMPGVLCSAKVVERLIEEEDRAAAASGRLAKGA

SEQ ID NO: 218 - DNA, 1575 bp, Artificial sequence
  source: /note="Description of Artificial Sequence: Engineered sequence; codons optimized for expression in Escherichia coli"
atggcaccggccccatcggcgattcaagacctggcggctccgcattctaagaccggcccggcggaccaaagcgacgtcttggtcattggtgcgggtttcggtggtatcgcggctgccctgcgcatgcgtgcgcgtggctactctgtgacgctggtggatcgtctggatgcgatcggtggccgtgcgcaagtgtttgagcgtggcggtttccgccatgatgcgggtcctaccgtcatcaccgcgccgttcctgtttgatgaactgtttgagttgttccgtgaacgtcgcgagaatcacctggatttccgtccgctggacccttggtatcgtttccatttccatgatggtaaccagttcgactaccgcgcgacggtggaagataccaacgcagagattgaacgcttctctccgcgtgacgtggccggctacgcgggtctgctggaggcaagccgtcagatcttcgaagtgggttttgagaaactggcagaccgcccgtttacccgttttatgaccatgatggcgcaggtccctagcttgctgcgcctgcgctcttatcacacggtggcgagcctggttaatcgtcacatcaagcatccgctgctgcgccaagcgttctccattcacccgctgttggtcggcggcaacccgtttactaccacgagcatttataccctgattcattacctggagcgccgttggggtgttttcttctgcatgggcggtaccggtaagctggttgaggagttgcatcgcctgctggaacgtgcgggcgtcaatgttgaattgggtgtggacatcgagcgtatcaccatgaaaggtggtcgtgcgacgggtgccgaaagcaccgctggtcgccgctacattgcggatcgtgtgatttgcaatggtgacccgccgaccgtgtatcagcaaatgctgcctaacgagactcgttccaagcgtgcaatccctgaggccgcgaccaaatactctatgggcctgtacgttatgttctttggtacccgtaagcaatatccggacgtcgcgcaccacaccatctggatgggtccgcgctatcgcgaactgctggcggacattttcgaccgtaagatcctggcggacgacttcagcctgtacctgcatcgtccgaccgccaccgattcgagctttgcgccggatggttgcgatagcttttatgttctgtgcccagtgccgaacttgctgggtgatgtcgactgggagtttgagggtccacgtctgcgtgatcgcatcgtcgcagcgctggaggaaacgatcatgccgggtctgggtgcatccatcaccgacgacttctggatgacgccggaggacttcaaacgcgattatcgtagcatgcatggtgcaggcttctctattgcaccaatcttcactcaatccgcgtggttccgctatcacaatcgtgatccgcacatcccgaacttgtatttcagcgcggcgggcgcacatccgggtgcgggtatgccaggcgtcctgtgcagcgcgaaagtggtggagcgcctgatcgaagaagaggatcgtgccgccgctgcctctggtcgcctggcaaagggcgcgtaa

SEQ ID NO: 219 - protein, 515 aa, Artificial sequence; identical to SEQ ID NO: 9
  source: /note="Description of Artificial Sequence: Engineered sequence; codons optimized for expression in Escherichia coli"

SEQ ID NO: 220 - DNA, 1548 bp, Artificial sequence
  source: /note="Description of Artificial Sequence: Engineered sequence; codons optimized for expression in Escherichia coli"
atggatgatgcacgtccgtattcctataagaaggatatggtggagcgtgtgcacagcgttgtggttggcagcggtttcggtggtattgcggcagctttgcgcatgcgtgcaaagggccatcaagttacgctgatcgaacgcctggaggacgttggtggccgtgcccgtgtgtttgaacgcggcggtttccgccatgatgcaggcccgacggtgattaccgccccgtttctgttcgatgagctgttcgacctgtttggtgaaacccgctctgagcacctgaagtttgtcccgctggacccttggtaccgcttccactttcatgacggctctgaatttgactatcgcccgagcctggctgatactcacgcagagatcgcccgcttcagcccggaggacaccaagaattacgaccgcctggttaatacgagcaagcagattttcgacgttggctttacccagctggctgacaaaccgtttacccgttttacctctatgatcaaactgattccgcagctgctgcgcctgcgctcgtacttgacggttgcccaattggtcaacagccacattaaacatccgttgctgcgtcaagcgtttagcatccacccgttgctggttggcggcaaccctttcgacaccacgagcatctacgcactgattcactacctggagcgtaagtggggcgtctacttctgtatgggcggcacgggcaaattggttgcggagctgaaggcactgatgatccgccagggcgttgacctgaaactgaacaccgacattatcgaaatttgcgtgagcgataagaaagtcaccggtgtgcgcactgcggatggcgcctttatctcggctgataatgtgatctgcaatgcagaccctcctacggtttatcgtcagatgctgccgagccaaacgcatctgcgcaagaaagttttgccggaagctgtgacccgttattcgatgggcctgttcgttctgttcttcggcacccaacagcgctacccggatattgcgcaccacaccatttggatgggcaagcgttacaaagatctgctgcatgatatcttttcgaagaagattctggcagaggacttcagcctgtacctgcatcgcccgaccgcgaccgacgcgcgtttcgccccggaaggctgtgatagcttctacgtgttgtgcccggttccgaacctgcaaggtgatgtggactgggcgaagcaaggtccgctgctgcaagaccgcatcgtcacggcgctggagaaatcgatcatgccagatctgcgtaacgtgattactgaggacttttatatgacgccggaggattttaaggctgactaccgttcggagcatggtgctggtttcagcattagcccgtccttcacgcagtccgcgtggttccgttaccacaatcgtgatccgcatctggcaaatctgtatttcagcggcgcgggcgcgcacccgggcgcgggtatgccgggtgtgctgtgtagcgcgaaggttgtcgaaaccctggttagcgaggatgagcgtaaggcggcgcacgtgcagccgacccgctaa

SEQ ID NO: 221 - protein, 307 aa, Artificial sequence
  source: /note="Description of Artificial Sequence: Engineered sequence derived from Salinibacter ruber; codons optimized for expression in Escherichia coli"
MSTLSLDTRADEDEWIWESFRYHSRTFSLAAYLLPRSVQMSVATLYLYCRRVDSIADQRVLEVGRERALQEVRQVRDRLDETLAGRPPAETVLWRRLAEVHEQSSLPRGPMYELIEGALWDLEGRPVVSKADLIEYSNLVGGSVGAMMLPFLADPERHDELEPAARKLGIAMQITNIVRDVGEDIDELDRVYLPEHWLDEHNVSVEALQQGRVADGYPALLEAAMEAAEQRYVDSFEGVAALPFRSRYGIRAAARMYREIMNEVRANDYDNLGRRAYVSFRRKLFLLLYDGYERRKHRLTSDALSGP

SEQ ID NO: 222 - DNA, 924 bp, Artificial sequence
  source: /note="Description of Artificial Sequence: Engineered sequence derived from Salinibacter ruber; codons optimized for expression in Escherichia coli"
atgtcgaccctgtctctggacacccgtgcggatgaggatgagtggatctgggaatctttccgttaccacagccgtacctttagcctggcggcgtatctgttgccgcgtagcgtgcagatgagcgtggctaccctgtacctgtattgccgtcgtgtggactccattgcggatcagcgtgtgttggaggtcggccgtgagcgcgccctgcaagaggtccgtcaggttcgcgatcgtctggacgaaaccctggccggccgtccgccggcagaaaccgttctgtggcgtcgtttggcagaggttcacgaacaaagcagcctgccgcgtggtccgatgtacgagctgatcgagggtgcgctgtgggacctggaaggtcgtccggtcgttagcaaagccgacctgattgagtatagcaacttggtcggtggtagcgttggtgccatgatgttgccgttcctggcagacccggagcgccatgatgaattggagccggccgcacgtaaattgggtatcgcgatgcaaatcaccaacattgtccgcgacgtgggtgaggacattgatgaactggatcgtgtttatctgccggaacattggctggacgaacacaacgttagcgttgaagcgctgcagcagggtcgcgtggcggatggttacccggcgttgctggaggcggcgatggaggctgcggagcagcgctatgttgatagcttcgaaggtgtcgctgctctgccgtttcgtagccgttacggcattcgtgcggctgcccgtatgtatcgcgagattatgaacgaggtccgcgctaacgactacgataatctgggtcgtcgtgcatacgtgtctttccgtcgcaagctgtttctgctgctgtatgacggttatgagcgccgcaaacaccgtctgaccagcgatgccctgagcggcccgtaa

SEQ ID NO: 223 - protein, 283 aa, Artificial sequence
  source: /note="Description of Artificial Sequence: Engineered sequence derived from Picrophilus torridus; codons optimized for expression in Escherichia coli"
MFTSIDHNNSDLIVSEVFQKGSTTYFYSSRFFPLHIRLKVSRLYAFVRVADNFVDSVPQQVDKFYNFKNEYERALKRGFSDDIIINKFIDLKNDVGIDDSWVDAFLNAMESDINKKIYYTVPELLSYIYGSAEVIGLMMARILDLDNRSYPYARMLGRAMQYLNFIRDFSEDLSMGRIYLPLEFTEINDFSYENVIKNIEAFNLFIRKNLNVYFSWNKQAAKGFRYIKYRYLVPIKTASDMYLWTGKIIYRNPMIVYKSKVKPGKRLIRGRGIYNLIGALRWI

SEQ ID NO: 224 - DNA, 852 bp, Artificial sequence
  source: /note="Description of Artificial Sequence: Engineered sequence derived from Picrophilus torridus; codons optimized for expression in Escherichia coli"
atgtttacgagcattgatcacaacaacagcgacctgattgtctctgaagttttccagaaaggttccaccacctacttttatagcagccgcttctttccgctgcacatccgtctgaaagttagccgtctgtatgccttcgttcgtgttgccgacaacttcgtggacagcgtgccgcaacaagtggataaattctacaactttaagaacgaatatgagcgtgcactgaaacgtggctttagcgatgacatcatcatcaataagttcatcgacctgaagaacgatgtgggcattgacgacagctgggtggatgcttttctgaatgcgatggagagcgacatcaacaagaagatttactatacggtcccggagctgttgagctacatttacggttccgcagaggtcatcggtctgatgatggcccgcattttggatctggataatcgttcgtacccgtatgcacgtatgctgggtcgcgcaatgcagtacctgaatttcatccgcgactttagcgaagatctgtctatgggccgtatttacctgccgctggaatttaccgagattaacgacttttcttacgagaatgtcattaagaatatcgaagcgttcaatctgttcattcgtaagaacctgaatgtttacttctcctggaacaagcaagcggctaagggttttcgctacattaagtaccgttatctggttccgatcaaaaccgcgagcgatatgtacctgtggaccggtaagatcatctaccgtaatccgatgattgtctataaatcgaaagtgaagccaggcaagcgtctgatccgtggccgtggtatttataacctgatcggtgcgctgcgttggatttag

SEQ ID NO: 225 - protein, 311 aa, Artificial sequence
  source: /note="Description of Artificial Sequence: Engineered sequence derived from Thermosynechococcus elongatus; codons optimized for expression in Escherichia coli"
MLQLPRAEYVPPLVSLDEAYELCRQVTATYAKTFYLGTLLMPPAKRRAIWAIYVWCRRTDELVDGPQAATTTLATLDEWEARLEDIFSGRPHDAMDLALTATLEHYPLNIQPFRDMIAGQRMDLRRSRYETFAELELYCYRVAGTVGLMSLEVMGGDPYSDRLCAPWVDPYQAKGTLKDQAIALGIANQLTNILRDVGEDMRRGRIYLPLEDLAAFNYTEEDLQRGVIDDRWRALMRFQIQRARQFYREAEVGVAYLERDARWPVWSALMLYRQILDVIEANDYDVFNRRAFVSDWRKLLFIPVSWLKASF

SEQ ID NO: 226 - DNA, 936 bp, Artificial sequence
  source: /note="Description of Artificial Sequence: Engineered sequence derived from Thermosynechococcus elongatus; codons optimized for expression in Escherichia coli"
atgctgcagctgccgcgtgcggagtacgtgccgccgctggttagcctggatgaggcctacgaattgtgtcgccaagtcaccgcgacctatgctaagaccttctatctgggtacgttgctgatgcctccggcaaaacgccgtgccatttgggccatctacgtctggtgccgtcgtaccgacgagctggttgatggtccgcaggcggcaaccacgactctggccaccttggatgagtgggaggcacgtctggaggacattttctctggccgcccgcacgatgcaatggacctggccctgaccgctaccctggagcactatccgctgaatatccaaccgttccgcgacatgatcgcgggtcaacgcatggacttgcgtcgctcccgttacgaaacctttgcagaactggaactgtactgctatcgcgtggccggtacggtcggcctgatgagcctggaggtcatgggtggcgatccttacagcgaccgcctgtgcgcgccgtgggtcgatccataccaggcgaaaggtaccctgaaggatcaggcgatcgcgctgggtatcgcgaaccagctgaccaacatcctgcgtgacgtcggcgaagatatgcgccgcggtcgtatttacctgccgctggaggacttggccgccttcaactataccgaagaagatctgcagcgtggtgtgattgacgaccgttggcgcgcgttgatgcgctttcagatccagcgcgcccgtcagttttatcgtgaggcggaggtcggtgttgcatatctggaacgtgacgcgcgttggccggtgtggtcggcattgatgctgtatcgtcaaattttggatgtcatcgaggcgaacgactacgacgttttcaaccgtcgtgcgttcgtttccgattggcgtaagctgctgtttattcctgtcagctggctgaaagcgagcttctaa

SEQ ID NO: 227 - protein, 306 aa, Artificial sequence
  source: /note="Description of Artificial Sequence: Engineered sequence; codons optimized for expression in Escherichia coli"
MTSNEQLTSEQSLAANGKSFHWARRFLGSRMGGDAARLYAFCRLLDDMADGDIENGPARLTAIRADLLAGRPGDDPALRAFLPLMTEKRFPPDVLIALMDGLLEDQDDVVVLADEAALLRYAYRVAGTVGLLMCHVLDCHAPSARAHAIDLGIAMQLTNIARDVLEDAQMDRRYLPGTWVGNADPGTILAAADDPDGLVAREVRAAVARLLSLADQFYASGAEGYRYLPWRAHMSIAVAARVYRQIGVQLAAVEFAWHEGRQVTSRSTKLRCSVLALAGLAGRFGPARGQHDGTLHTALRGLPYVA

SEQ ID NO: 228 - DNA, 921 bp, Artificial sequence
  source: /note="Description of Artificial Sequence: Engineered sequence; codons optimized for expression in Escherichia coli"
atgacctccaacgaacaactgacgagcgaacagtccctggcggcgaatggtaaatcctttcactgggcgcgtcgttttctgggtagccgtatgggtggtgatgcggctcgtctgtacgcattttgccgtctgttggacgatatggccgatggcgacatcgagaacggcccggcccgcctgaccgcgatccgtgcggacctgttggctggtcgtccgggtgacgacccagcactgcgcgcatttctgccgctgatgaccgagaaacgctttccgccggacgtgctgatcgcgctgatggatggtctgctggaggatcaagacgacgtggtggtgctggcagatgaagctgcactgctgcgttatgcatatcgcgttgccggtacggtgggtctgctgatgtgccatgtgctggactgtcatgctccgagcgcgcgtgctcatgccattgacctgggcattgcgatgcagctgacgaacatcgcacgcgacgtcctggaggacgcgcagatggatcgtcgctacttgccgggtacctgggtcggcaatgcagatccgggtaccatcctggccgccgccgatgatccggacggcttggttgcccgtgaggtgcgcgcggccgttgctcgtttgctgagcttggccgaccagttttacgcgtcgggcgcggagggttaccgttacctgccgtggcgcgcacacatgtcgattgcagttgcggcgcgtgtttaccgtcagatcggcgtccagctggcggcggttgaatttgcttggcatgagggtcgccaggtcacctcgcgctctacgaaactgcgttgcagcgtgttggccctggcaggtctggccggccgctttggtccggcacgtggtcaacatgacggcaccctgcacacggcattgcgcggcctgccgtatgtcgcgtga

SEQ ID NO: 229 - protein, 305 aa, Artificial sequence
  source: /note="Description of Artificial Sequence: Engineered sequence; codons optimized for expression in Escherichia coli"
MSNETLTSEQSLAANGKSFHWARRFLGDRMGHDAARLYAFCRLLDDMADGDIEDGPARLAIIREDLLAGRGGDDPAFAAFLPLMHEKQFPPEVLVALIDGLLEDQAAEVALADEAALLRYAYRVAGTVGLLMCHVLDCHSPAARAHAIDLGIAMQLTNIARDVLEDAQMGRRYIPGDWVGGATPDDIRAAAQDPSAPPAEAVTVAVGRLLDLAEAFYASGASGYPFLPWRAHLSIAVAARVYRQIGVQLRGAGLAWHQGRQVTSKATKLRCSLVALASFRRRIGSGRTAHDPQLHTALRGLPYVA

SEQ ID NO: 230 - DNA, 918 bp, Artificial sequence
  source: /note="Description of Artificial Sequence: Engineered sequence; codons optimized for expression in Escherichia coli"
atgagcaacgagactctgacgagcgaacagagcctggcggcaaatggtaagagcttccattgggcgcgtcgctttctgggtgatcgcatgggccatgatgccgcgcgtctgtatgcattctgtcgcctgctggacgacatggcggatggtgacattgaggatggtccggcccgtctggccatcattcgcgaggatctgctggcgggccgtggcggcgacgatccggcgtttgctgcttttctgccgctgatgcacgagaagcaattcccgccggaggtgctggttgcgctgatcgatggcctgttggaagatcaggcagccgaagtggccttggcagatgaagcagcactgttgcgctacgcgtatcgtgtggcgggcactgtgggtctgctgatgtgccatgttttggactgccactctccagcggcacgcgctcacgccattgatctgggtatcgcgatgcagctgaccaacattgcgcgtgatgtgctggaggatgctcaaatgggtcgtcgctatatcccaggtgactgggttggtggcgcgaccccagacgacatccgtgcggcggcacaagacccgtccgcgccgccggcagaagcggtcaccgtggcggttggccgtctgctggatttggccgaggccttctatgcgagcggcgctagcggttacccgtttctgccgtggcgtgcccacttgagcattgcggtcgcagctcgcgtttatcgtcagattggtgtgcaactgcgtggtgcgggcctggcgtggcaccagggccgccaggtgacgagcaaggcgacgaaactgcgttgctcgctggtcgcgctggctagctttcgccgtcgtattggctcgggccgcactgcccacgacccacagctgcacaccgcgctgcgtggtctgccgtacgtggcgtga

SEQ ID NO: 231 - protein, 305 aa, Artificial sequence
  source: /note="Description of Artificial Sequence: Engineered sequence; codons optimized for expression in Escherichia coli"
MSNEELTSEKSLAANGKSFHWARRFLGQRMGSDAASLYAFCRLLDDMADGDIQNGPTRLAAIRADLIAGREGADPAFLAFLPLMREKRFPTDVLVALIDGLLEDQAEEVALADEAALLRYAYRVAGTVGLLMCHVLDCQAPAARAHAIDLGIAMQLTNIARDILEDAGMNRRYVPGDWVGHASPHEIRAAARSPESMLARDVTAAAGRLLDLAETFYASGARGYRYLPWRAHLAIGVAARVYRQIGIQLRGANLAWHAGRQVTGKAAKLRCSLLALGSFGRRIGIGTSPHDDRLHAALRGLPYVA

SEQ ID NO: 232 - DNA, 918 bp, Artificial sequence
  source: /note="Description of Artificial Sequence: Engineered sequence; codons optimized for expression in Escherichia coli"
atgagcaacgaagagctgaccagcgagaaaagcctggcggcaaacggtaagtccttccattgggcgcgtcgcttcctgggccagcgtatgggctctgatgcagcgagcctgtacgcgttctgccgcctgctggacgacatggccgatggcgatatccaaaatggtccgacgcgcttggccgcgatccgtgcggatctgattgccggtcgtgagggcgccgatcctgcatttctggcatttctgccgctgatgcgtgagaagcgttttccgacggacgttctggtcgctctgattgatggtttgctggaggaccaggcggaagaggttgccttggcggatgaggcggcactgctgcgctatgcatatcgtgtcgcgggcaccgtgggtctgctgatgtgtcacgtgctggactgtcaagcaccggcggctcgtgcacacgcgattgacctgggtattgcgatgcaactgacgaatatcgcgcgtgatatcctggaggacgcgggcatgaatcgccgttacgtgccgggcgactgggtgggccacgccagcccgcatgaaatccgtgctgcggcgcgtagcccggagagcatgctggcccgtgatgttaccgcagccgcgggccgtctgttggacctggcggaaaccttctatgcgagcggtgcacgtggttatcgctatttgccgtggcgtgctcacctggcgatcggtgtggccgcccgtgtctatcgtcaaattggtattcagctgcgtggtgcaaatctggcctggcacgcaggtcgtcaggtcaccggtaaggcggctaagctgcgctgtagcctgctggcgttgggttcttttggtcgccgtatcggcattggtacgtcgccgcacgacgaccgcttgcatgccgccctgcgtggtttgccgtacgtggcctga

SEQ ID NO: 233 - protein, 327 aa, Artificial sequence; identical to SEQ ID NO: 8
  source: /note="Description of Artificial Sequence: Engineered sequence; codons optimized for expression in Escherichia coli"

SEQ ID NO: 234 - DNA, 984 bp, Artificial sequence
  source: /note="Description of Artificial Sequence: Engineered sequence; codons optimized for expression in Escherichia coli"
atgagcagcccgcgtgccgagcagaaacaacaggatgcgcactatccggcggaacgtggtaccgccctgaaaacgctggcaaagaatggtaagagcttctactgggcgagccgcctgctgggccgccaaatggcaatcgatgctgccgagctgtatagcctgtgtcgcttgttggatgacattgcggacggtgatattaacggtctggatacgaaggaaggcacccatcgtctgcgccatatccgccgccagctgacgcaaatcgatgcaggtaagattccggaacagccagatccggcgttgctgcaatatatgcaagttatgaatcgttgccaaatcccggtgatgccactgatccatctgctggatggtctgctgctggatcagtcggcgatgctgctgaaagacgaagcagacctggttgcatacgcttaccacgttgcaggtgcggttggtttgctgatgtgcccggtgttgggctgtgatgatcgtaccgcgtttcgttttgcagttgatatgggcatcggtatgcagctgaccaacattgcccgtgacattctggaagatgcgcaaatgggtcgtcgttatctgccagaaagctggacgggccaactgtctccggatcagattgtggcgtgtgccgaggcgccggagagccagaattataaacagatccaggcggcagccgaccgtttgctgactctggcagaccagtactacgagagcggccgtttgggcttgggctttctgccggtgcgtgcgcgctactgtattgccgttgcagcgggtgtttatcgcgctattggcacgaaactgcgtacccgtaagctgcgttggggcgatggccgtgttgtgacgagcaaaagcgagaaattgagcgcatctttgcaggcgttgtccaaactgtatcgtctgccgaaagccacccacaacacgaatctgcacgctccgttgacgtccctgttggacgaggcgctgaagtaa

SEQ ID NO: 235 - protein, 345 aa, Artificial sequence
  source: /note="Description of Artificial Sequence: Engineered sequence derived from Picrophilus torridus; codons optimized for expression in Escherichia coli"
MKEYSIHLSSLKDKIEKELKNFFEKKLDACDDENIRYVIKELMEFTMNGGKRLRPIMMITGYSLFNDIDDNIIKASISIELAQSYLLIHDDIMDQSDMRRGRPSFHRSVETRLNDPRNSMNIAIVAGDLIDSFSHEALLTSGFDIKNLISADYEFSKVIEDTGKGQLIDIFSSLDDEFSESRLMKLHYMKTARYTIEGPLVMGAMLAGNKKDIDYLRIYGKNIGIAFQIKDDILGLFGDEKQTGKSIKSDVNEGKKTLLMIKAYERSNNMIRDYIKTCLSSGDISDIDFKKLKDIVVSTGSYDYSLKIMEDLISKGKSALKMVSGNEESKAMLEYLSDYILNRSN

SEQ ID NO: 236 - DNA, 1038 bp, Artificial sequence
  source: /note="Description of Artificial Sequence: Engineered sequence derived from Picrophilus torridus; codons optimized for expression in Escherichia coli"
atgaaggagtatagcatccacctgagctccctgaaagacaaaattgaaaaggagttgaagaatttctttgagaagaaattggatgcttgtgatgacgagaatatccgctacgttattaaggagctgatggaatttaccatgaacggtggcaagcgtctgcgcccgatcatgatgatcacgggctacagcctgttcaacgatattgacgataacatcattaaagcgtctattagcatcgagctggcacaatcctacctgctgatccacgatgacattatggatcagagcgatatgcgtcgcggtcgcccgtctttccatcgcagcgttgaaacccgcctgaatgatccgcgtaacagcatgaacatcgcgatcgtggcaggtgatctgattgacagcttcagccatgaagccctgctgaccagcggcttcgatatcaagaacttgatttcggctgattatgagttctcgaaggtgatcgaggataccggcaagggtcagttgattgatatcttttcgagcctggacgatgagttcagcgaaagccgtctgatgaaactgcactacatgaaaaccgcccgttataccattgagggtccgttggttatgggtgcgatgttggcgggtaacaagaaagacattgactacctgcgcatttatggtaagaacatcggtattgccttccaaattaaagacgatatcctgggtctgttcggtgacgagaagcagactggtaagagcatcaaaagcgatgttaatgagggcaagaaaaccttgttgatgatcaaagcgtacgaacgctccaacaatatgattcgtgattatattaagacctgcttgtcgagcggcgatatctctgacatcgacttcaagaagctgaaggatattgtggttagcacgggctcgtacgattacagcctgaagatcatggaggacctgattagcaagggcaaaagcgcgttgaagatggtgagcggtaatgaagaatccaaagctatgctggagtacttgtccgactacattctgaatcgctccaattaa

SEQ ID NO: 237 - protein, 307 aa, Artificial sequence
  source: /note="Description of Artificial Sequence: Engineered sequence derived from Thermosynechococcus elongatus; codons optimized for expression in Escherichia coli"
MISADPPQVHPAGTFDLKAYLKERQALVEAALEASIPVAYPEKIYDAMRYSLMAGGKRLRPILCLATCELMGGTVEMAMPTACALEMIHTMSLIHDDLPAMDNDDYRRGKPTNHKVYGEDIAILAGDGLLAYAFEYVVEQTKNVPAEYLLKIVARLGHAVAATGLVGGQVVDLECEGQPDIGLETLHFIHSHKTGALLEASVVSGALLTGAHESDVARLSRYAANIGLAFQIVDDILDITSTRDVLGKTVGKDVAAQKMTYPRLWGLEKSRQEAERLVAEAKAELAVYGAAAVPLQAIADYITSRSH

SEQ ID NO: 238 - DNA, 924 bp, Artificial sequence
  source: /note="Description of Artificial Sequence: Engineered sequence derived from Thermosynechococcus elongatus; codons optimized for expression in Escherichia coli"
atgatcagcgcggacccaccgcaggtgcacccggcgggtacctttgatctgaaggcttatttgaaggaacgtcaagcattggttgaagcggcactggaggcatccatccctgtggcgtatccggaaaagatctacgacgcgatgcgctacagcctgatggcgggtggcaaacgtctgcgtccgattctgtgcctggctacctgcgagctgatgggcggtaccgtcgaaatggcgatgccgactgcatgcgccctggagatgattcacacgatgtccctgatccatgacgatttgccagcaatggacaacgacgactaccgccgcggcaaaccgacgaaccataaagtttatggtgaggacattgcaattctggcgggtgacggcctgctggcgtacgcgttcgaatatgttgtggaacaaactaagaatgtgccggcggaatacctgctgaagatcgttgcccgtctgggtcatgcggtcgcggcaacgggtctggttggtggccaagtcgtggacttggaatgcgaaggccaaccggacatcggcctggaaactctgcactttatccattcccacaaaaccggtgccctgctggaggcgagcgttgtgagcggtgctctgctgaccggtgcacatgagagcgacgtggcacgtttgtcccgttatgcagccaacatcggtttggcgtttcagattgtcgatgatatcctggatatcacctctacccgcgatgtgctgggtaagaccgttggtaaagatgtggcagcgcaaaagatgacgtatccgcgtctgtggggcttggaaaagagccgtcaagaggccgaacgtctggttgcagaggccaaggctgaactggcggtgtatggcgcggcggcagtgcctctgcaggcaatcgcggactacattaccagccgtagccactga

SEQ ID NO: 239 - protein, 239 aa, Artificial sequence
  source: /note="Description of Artificial Sequence: Engineered sequence derived from Pyrobaculum arsenaticum; codons optimized for expression in Escherichia coli"
MNLYEYLSQGIKHFTLIDPDKSVDYLRIARYALEAGTDGILVGGSLGITASQMEKVVKDIKSVANVPVVLFPGSLSQLTDAADGVLFLSVLNSLDPYFIIGAQVHGAVLIAKHYPRLEVISTAYVIVGDGGAAGFVSMSKPIPYTRPDIATAYALAAGYIGFKALYLEAGSGAPQPVPPDMVRAVRKAFPRVLIVGGGIRSSEVARSIAREGPNVIVTGTLAEESPEKLGEIVRAIKQR

SEQ ID NO: 240 - DNA, 720 bp, Artificial sequence
  source: /note="Description of Artificial Sequence: Engineered sequence derived from Pyrobaculum arsenaticum; codons optimized for expression in Escherichia coli"
atgaacttgtatgagtacctgagccaaggtatcaaacatttcactctgattgacccggataaatcggtcgattacctgcgcattgcacgttacgcattggaagctggcacggacggtattctggtgggtggttctctgggtattaccgctagccagatggagaaggtggtgaaagacatcaagagcgtggctaacgtcccggtggtgctgtttccgggcagcctgagccagctgacggacgcggcggatggcgttctgttcctgagcgttctgaactctctggacccgtattttatcattggtgcccaggttcatggcgcggtgctgattgccaagcattatccgcgcctggaagtcattagcactgcttacgtcattgttggcgatggcggcgcagcgggcttcgtgagcatgagcaagccgattccttatacccgtccggacatcgccactgcatacgcactggcggcgggttatatcggtttcaaagcgttgtatctggaagcaggcagcggtgctccgcaaccagtcccgccggacatggttcgcgcggttcgtaaggcttttccgcgcgttctgatcgtgggtggtggtatccgtagctctgaggtggcgcgtagcatcgctcgcgaaggtccgaatgtgattgtcacgggcaccctggcggaggaaagcccggagaaactgggtgagattgtgcgtgcgatcaaacaacgttaa

SEQ ID NO: 241 - protein, 341 aa, Artificial sequence
  source: /note="Description of Artificial Sequence: Engineered sequence; codons optimized for expression in Escherichia coli"
MTDLSTSAKDIFSKSGTGLPASQSTAEIIHGFIIERMPKIGEPLSEAALHHFASPGKMLRAKMALRAADHLNVDRYAALHWAAAIEVLHNASLIHDDICDGDRLRRERPAVWSVYGRDVALTLGDWLVALSFELAAEAAQRAQTPMLVKILATHMKTTTDGEAREFDVQPVRDWDHYLKGAGDKTAPLLTAPLEGVAAMALHGGSAPIIGDCFRALGNAYQIANDILNFSGGDGANTCGSDLGRRAPNGVVVLFRQQLDAQGQSKFDDWYACGASEGLEAWVDELRASGAPAEAARRMESLLGDATAYAGRLPTELSAVITPIQQLLQQVCLKSVASLNKG

SEQ ID NO: 242 - DNA, 1026 bp, Artificial sequence
  source: /note="Description of Artificial Sequence: Engineered sequence; codons optimized for expression in Escherichia coli"
atgactgatctgtccacgagcgcaaaagacatctttagcaagagcggcaccggcctgccggcgagccagagcaccgccgagattattcatggtttcatcattgagcgcatgccgaagattggtgaaccgttgagcgaggcagctctgcaccatttcgcctccccgggcaaaatgttgcgtgctaaaatggctctgcgtgcggcagaccatctgaatgtcgatcgctatgcagcgttgcattgggcggcggccattgaggtgctgcacaacgcatctttgatccacgatgacatctgcgatggtgatcgtctgcgtcgtgaacgcccggcagtctggagcgtctatggccgtgacgtggccctgaccctgggtgactggctggtggcgttgagctttgaactggcggccgaggcagcgcaacgcgcccagacgccaatgctggtcaagattctggcgacccacatgaaaaccactaccgatggtgaagcacgcgagttcgacgtgcagccggtgcgtgactgggatcactatctgaagggtgcaggcgataaaaccgctccgttgctgaccgcgccactggagggtgttgccgcaatggccctgcacggtggtagcgccccgattatcggtgactgctttcgcgcgctgggtaacgcataccaaatcgcaaacgatattttgaactttagcggcggtgatggtgcgaatacctgtggtagcgatttgggccgccgcgcacctaatggcgtcgttgttctgttccgtcagcagttggacgcgcaaggccagtccaagttcgacgactggtacgcatgcggcgcgagcgagggcctggaagcatgggtggacgagctgcgtgcgtctggcgcgccggctgaagccgcgcgtcgcatggaaagcctgctgggcgatgctacggcttacgccggccgcctgccgactgagctgagcgcagttatcactccgatccagcaactgttgcagcaagtctgtttgaaatccgtggcctccctgaacaagggttga

SEQ ID NO: 243 - protein, 344 aa, Artificial sequence
  source: /note="Description of Artificial Sequence: Engineered sequence; codons optimized for expression in Escherichia coli"
MGPMTNLSTPSNEILRDARNGAAISPSTSEIIHDFIIERMPQAGQPLAEAAAHHFASPGKMLRAKMALSAADLLKVDRPAALHWAAAIEVLHNASLIHDDICDGDRLRRGRPAVWSQFGRDVALTLGDWLVALSFELAAEAAQRAQTPMLVKILATHMKTTTLGEAREFDLQPVTDWQHYLQGAGDKTAPLLTAPIEGVATMALHGGAAPTIGACFRALGNAYQIGNDILNFSGRDGADTCGSDLGRRAPNGVVVLFRDYLDDSRRADFDDWYRSGSDDGFEDWLAALRTSRAPAEAARRMNMMLDDASRLSESLPAELSAVIRPIQQLLQQVCLKSVASLKQG

SEQ ID NO: 244 - DNA, 1035 bp, Artificial sequence
  source: /note="Description of Artificial Sequence: Engineered sequence; codons optimized for expression in Escherichia coli"
atgggtccgatgaccaacctgtcgacgccgagcaatgaaattctgcgcgatgcgcgtaatggtgcggcgatctccccgagcacgagcgagattattcatgacttcatcatcgagcgtatgccgcaggcgggccagccgttggcagaggccgccgctcatcactttgcttccccgggcaaaatgttgcgtgcgaaaatggcactgagcgcggccgacctgctgaaagtcgaccgcccagcggcgctgcattgggccgcagcgatcgaggtcctgcataacgcaagcctgatccacgatgacatctgcgatggcgaccgtctgcgccgtggccgtccggctgtttggagccaatttggccgtgacgtggccctgacgctgggtgattggctggttgcgctgagctttgaactggcggcggaggccgcgcagcgtgcgcagaccccgatgttggttaaaatcttggcgactcacatgaaaacgaccaccctgggtgaagcgcgtgagtttgacctgcagccggtcaccgattggcagcactatctgcagggtgccggtgataagaccgcgccattgctgaccgctccgatcgagggtgtcgcaactatggcactgcacggcggcgcggctccgaccatcggcgcgtgtttccgtgcgctgggtaacgcgtatcagattggtaatgatattctgaacttttccggccgtgatggcgcggacacgtgcggctctgacctgggccgtcgtgcaccgaacggtgtcgttgttctgtttcgtgactatctggatgactcccgtcgtgcggactttgatgattggtatcgttctggctctgacgacggcttcgaggattggttggcggcgttgcgcactagccgcgctcctgctgaagcagcgcgccgtatgaacatgatgctggacgacgcgagccgtctgagcgagtctttgccggccgagctgtctgcggtcattcgcccgattcagcagttgttgcagcaagtttgcctgaaaagcgtggccagcctgaagcagggttga

SEQ ID NO: 245 - protein, 338 aa, Artificial sequence; identical to SEQ ID NO: 10
  source: /note="Description of Artificial Sequence: Engineered sequence; codons optimized for expression in Escherichia coli"

SEQ ID NO: 246 - DNA, 1017 bp, Artificial sequence
  source: /note="Description of Artificial Sequence: Engineered sequence; codons optimized for expression in Escherichia coli"
atgacggagaacatcgccagccaggttaacgagatgcaaggtgctgagaagctggacgcgttgccggatctgagcgcagtcctgtctgcatttattgtccgtcgtctgccgtccggtaaacacccgctggcaacggctgcccaacaccacttcaagcgcaccggcaagcagctgcgtggccgcatggcgctggctgctggtgattctttcggtgtgccgcgtacggcgagcctgccgtgggcggctgcggtcgaggtgctgcacaatgcgagcctggttcacgacgatatctgtgacggtgacatggttcgccgtggtgccccgtccgtgtgggcgttctatggtcgtgataccgcgttggccttgggtgactggctgatcgccctgagcttcgagctggcggcggaggcagcatacctgggccagaccccgcaactggttagcattctgagccgtcacatggctgccaccactgcaggtcaggcactggagttcgaggtccgcgcgtacccagattggtccggctatatggacatctcgaccggtaagaccgctccgctgttcatcgcgagcgtcgagggtatcgcacatctggccggtcgtcgtgatgccattcgtccgctgaatcgtttcttctctgcagccggtggttgctaccagattgcaaatgacatgttgaacgtcatcggcaaggacggtgcggagagcccggcatctgatctgctgcgtcgtgcgccgaatgcggtcattgtcatgtttcagaccactctggataaacacaccgctactgcctttgataaatggctgagcagcggtgacacgcatggtgcactgacctggcaggaacacgtccgtcgcagcccagcgctgaccatgacctccagcgcgttgctgtcgatgctggaggaggcggaagcatctagcgcagcctttccgaccgattgtcgcgcgatcattacgccgatcctggcacaactgcgtcatgtttgccgtgacctgacctctctgaacgcgtga

SEQ ID NO: 247 - protein, 341 aa, Artificial sequence
  source: /note="Description of Artificial Sequence: Engineered sequence; codons optimized for expression in Escherichia coli"
MTDLSTPSKHAFVEQGSGLSISKSTSEIIHDFILERMPAPGQTLADAAMHHFAAPGKMLRAKMALRAADLLKVDRPAALHWAAAIEVLHNASLVHDDICDGDQLRRGRPAVWSKFGRDVALTLGDWLIALSFELAAEAAQRAQTPMLLKILATHMKTTTVGEAHEFDPAPVTDWDHYLQGAGDKTAPLLTAPLEGIAAMALHGGAAPTIGACFRSLGNAYQIGNDILNFSGSDGANTCGSDMARRAPNGVVVLFRQTLDADRLAAFDSWYASGSDDGFDAWLAELRRSPALFEAARRMNAMLDDATGLADTLPPEMAAVITPIQQLLQQVCLKSVASIKQA

SEQ ID NO: 248 - DNA, 1026 bp, Artificial sequence
  source: /note="Description of Artificial Sequence: Engineered sequence; codons optimized for expression in Escherichia coli"
atgactgacctgtcgacgccgagcaaacacgcatttgtggagcaaggcagcggcctgagcattagcaaaagcacctccgagattatccacgattttatcttggagcgtatgccggcacctggtcagaccctggctgatgctgcgatgcaccactttgctgcaccgggcaagatgctgcgtgcgaaaatggcgctgcgcgccgccgatctgctgaaggtggatcgtccggcagcactgcattgggcggcggcgatcgaagtgctgcacaacgctagcctggttcacgacgatatttgtgacggtgatcagttgcgtcgcggtcgcccggcagtctggagcaagtttggccgtgatgtcgcgctgactctgggtgactggctgattgcgttgagcttcgagttggcagctgaggcggcccaacgcgcccagactccgatgctgctgaaaatcctggcgactcacatgaaaaccaccacggtcggcgaggcgcatgaatttgatccagcgcctgtcaccgactgggaccattatctgcaaggcgcaggtgacaaaacggctccgttgctgacggcaccgctggaaggtatcgctgcaatggcactgcatggtggtgcggcgccgaccattggtgcctgtttccgtagcctgggtaacgcatatcagatcggtaatgatatcctgaacttcagcggctctgacggcgccaacacgtgtggctctgacatggcacgtcgtgcgccgaatggtgttgtggtgctgtttcgtcaaacgctggatgcagaccgcctggcggcatttgacagctggtacgcgagcggcagcgacgacggtttcgacgcgtggctggcggagctgcgtcgtagcccggcgctgttcgaggcagcgcgccgtatgaacgccatgctggacgatgctaccggcctggcggatacgctgccgccagaaatggccgccgtcattaccccgattcagcagttgctgcaacaagtgtgcctgaagagcgttgcaagcattaagcaagcatga

SEQ ID NO: 249 - protein, 294 aa, Artificial sequence
  source: /note="Description of Artificial Sequence: Engineered sequence derived from Salinibacter ruber; codons optimized for expression in Escherichia coli"
MVGYLIGMVALNLPHGGYEHFANLRHRRVSFSLRYIVLYLAFLVGFVGFFFVAPVVALGLAFSTAVIKGGHGGLKVMDALCGTEHLQSSWQRGLAAFVRGGAVMLVPLLAWPGVYVTFSTYMVHIFGAAGPLPLATRLADVQVAVGTVYGLALVAHLGGGLYAGGLSRAWLTDAAETTLLVVYFTFVPMMLAVGLYFPLWYTLRQTARTTAVASDAPAPDRLSLPLTWAAMVLGALVTFGLMAGFYVLVPNPLGGAGLLGGAVAFYTIFVCLLALPHIVVGEWLDPARGIWYVP

SEQ ID NO: 250 - DNA, 885 bp, Artificial sequence
  source: /note="Description of Artificial Sequence: Engineered sequence derived from Salinibacter ruber; codons optimized for expression in Escherichia coli"
atggttggttatctgatcggtatggtggcgctgaacctgccgcacggcggttatgaacactttgcaaacctgcgtcaccgccgcgttagcttttccctgcgttacattgttttgtatctggcgtttctggttggtttcgttggcttcttctttgttgcgccggtggtggcgttgggtctggcatttagcaccgcagtcatcaaaggcggtcatggtggcttgaaagtgatggacgcgctgtgcggcacggagcatctgcagagcagctggcagcgcggtctggcggcgtttgtgcgtggtggtgcggttatgctggtgccgctgctggcgtggccgggcgtttatgttaccttcagcacttacatggttcacattttcggcgcggcaggtccgttgccgttggccacccgcctggcggatgtccaagttgcagtgggtaccgtgtacggcctggcgctggtggcccatctgggtggtggtctgtatgcaggtggtctgagccgtgcatggctgaccgacgcggcagaaaccaccctgctggttgtctactttaccttcgtcccgatgatgctggcagttggcctgtacttcccgttgtggtacaccttgcgtcaaaccgcgcgtaccaccgccgtggcgagcgatgcgccggccccggatcgtctgagcctgccgctgacgtgggcggcgatggtgctgggtgcattggttacgtttggtctgatggcaggcttttatgttctggtgccaaacccgttgggtggcgccggcctgctgggcggtgcagtcgcgttttacaccatctttgtttgtttgctggcgttgccgcacatcgtcgttggcgagtggctggacccggcgcgcggtatctggtacgtgccgtaa

SEQ ID NO: 251 - protein, 255 aa, Artificial sequence
  source: /note="Description of Artificial Sequence: Engineered sequence derived from Candidatus Pelagibacter ubique; codons optimized for expression in Escherichia coli"
MKKLKLFALTAVALMGVSGVANAETTLLASDDFVGISFWLVSMALLASTAFFFIERASVPAGWRVSITVAGLVTGIAFIHYMYMRDVWVMTGESPTVYRYIDWLITVPLLMLEFYFVLAAVNKANSGIFWRLMIGTLVMLIGGYLGEAGYINTTLGFVIGMAGWFYILYEVFSGEAGKNAAKSGNKALVTAFGAMRMIVTVGWAIYPLGYVFGYMTGGMDASSLNVIYNAADFLNKIAFGLIIWAAAMSQPGRAK

SEQ ID NO: 252 - DNA, 768 bp, Artificial sequence
  source: /note="Description of Artificial Sequence: Engineered sequence derived from Candidatus Pelagibacter ubique; codons optimized for expression in Escherichia coli"
atgaagaaactgaagctgttcgcgctgacggctgtcgccctgatgggcgttagcggtgtcgccaatgccgagactaccctgttggcctccgacgacttcgtgggtattagcttttggctggtgtctatggcactgctggcgagcactgcattcttctttattgagcgtgcgagcgtgccggcaggttggcgtgtcagcattactgttgccggcctggtcacgggcatcgcattcatccactatatgtatatgcgtgatgtttgggtgatgaccggtgaaagcccaaccgtttaccgctatatcgactggctgatcacggttccactgttgatgctggaattttatttcgttttggcggctgttaataaggcaaattccggtatcttctggcgcctgatgatcggtacgctggttatgctgattggtggttatctgggtgaggcgggctatattaacaccaccttgggttttgttattggtatggcaggctggttttacatcctgtatgaggtgttcagcggtgaagcgggtaagaatgcggcaaagagcggtaacaaagctctggtgacggcatttggcgcaatgcgtatgatcgtcacggttggttgggcaatctacccgctgggttatgtgttcggctacatgactggcggtatggatgcaagcagcctgaacgtgatctataatgcggccgacttcctgaataaaattgcttttggcctgattatttgggcagctgcaatgagccaaccgggtcgtgcaaagtaa

SEQ ID NO: 253 - protein, 254 aa, Artificial sequence
  source: /note="Description of Artificial Sequence: Engineered sequence; codons optimized for expression in Escherichia coli"
MGTALKASLVAAGLATLPSVANAATTMLAATDYVGISFWTISMAMMAAAIFFLMEAGRLPGKWKTAMTIGALVQIVAAVHYFYMRDVWVTTGDTPTVYRYVDWLITVPLQMVEFYFILAAVAAVSAGIFWRLMIGSLVMLVAGYLGEAGLVNAWLGFVVGMAGWAYILYEIFAGEAGKVSAESAPEAVQKSFGTMRMIVTVGWAIYPLGYFLGYLNGAADAVTLNVIYNVADVVNKIAFVGVIWAAANAEASKA

SEQ ID NO: 254 - DNA, 765 bp, Artificial sequence
  source: /note="Description of Artificial Sequence: Engineered sequence; codons optimized for expression in Escherichia coli"
atgggcaccgccctgaaggcgagcttggttgctgcgggtttggcgaccttgccaagcgtcgccaacgcggcaacgaccatgttggcggcaacggattacgttggtattagcttttggaccatctctatggcgatgatggccgctgcgatcttcttcctgatggaagcgggccgtctgccgggtaaatggaaaactgccatgaccatcggtgcgctggtccaaattgtggcggccgtccactacttttatatgcgtgatgtgtgggttactaccggtgacacgccgacggtgtaccgctacgttgactggttgattaccgtcccgctgcaaatggtggagttttactttattctggcagcggtcgcggctgtcagcgcaggtatcttctggcgtctgatgatcggtagcctggtgatgctggttgcgggttatctgggtgaggcgggtctggtgaatgcatggctgggctttgtcgttggtatggcgggctgggcgtatatcctgtatgagattttcgcaggtgaagcgggtaaagtgtccgcggagagcgcacctgaggctgtgcaaaagtccttcggtaccatgcgtatgatcgtgaccgttggttgggcaatctatccgctgggttatttcctgggctacctgaacggcgcggcggacgcggtgaccctgaacgtcatctacaacgtcgctgatgtggtgaacaagatcgcattcgtgggcgtcatttgggctgccgccaatgcggaagcaagcaaggcgtaa

SEQ ID NO: 255 - protein, 261 aa, Artificial sequence
  source: /note="Description of Artificial Sequence: Engineered sequence; codons optimized for expression in Escherichia coli"
MKLFSGKATKTALIAAALAITPKVAFAAENLASDDFVGISFWLISMALVASTAFFFIETQRVEGKWKTSLTVSGLVTLVAAVHYFYMRDVWVNTGATPTVYRYIDWLITVPLLMIEFYLILRAIANVSSGIFWRLTVGTLIMLVGGYAGEVGYMNVWLGFVIGMAGWFYILYEIFAGEAGKLSAEQAPESVKSAFSTMRWIVTIGWAIYPLGYFYGYLATGDPASSADSLNVIYNLADVLNKIAFGVIIWNVAVTETEAKA

SEQ ID NO: 256 - DNA, 786 bp, Artificial sequence
  source: /note="Description of Artificial Sequence: Engineered sequence; codons optimized for expression in Escherichia coli"
atgaaactgtttagcggcaaagcaaccaaaaccgctctgattgccgccgcgctggctattacgccgaaagtcgcttttgcagctgaaaacttggccagcgacgacttcgtgggtatctccttttggctgatttcgatggctctggtcgcgagcacggcgttcttctttattgagactcagcgtgtcgagggtaaatggaaaacgagcctgaccgtttccggcttggttacgctggtggcagcggtgcactatttctatatgcgcgacgtgtgggtgaacaccggtgcgaccccaaccgtttatcgttatattgactggttgattaccgtcccgctgctgatgatcgagttctacttgatcctgcgtgcaatcgcgaacgtgagcagcggtattttctggcgtctgacggttggcaccctgattatgctggttggcggctacgccggtgaagtcggctacatgaatgtgtggctgggtttcgtgattggtatggccggctggttttatattctgtacgaaattttcgctggtgaggctggtaaactgtccgcggaacaggcaccggagagcgttaagagcgcgtttagcaccatgcgctggattgtgaccatcggctgggcgatctacccactgggctatttctacggttatctggccactggtgacccggcaagcagcgcagacagcctgaatgttatctacaacctggctgacgttctgaacaagatcgcctttggcgtcatcatctggaatgtggcggtcaccgagactgaagccaaagcataa

SEQ ID NO: 257 - protein, 258 aa, Artificial sequence
  source: /note="Description of Artificial Sequence: Engineered sequence; codons optimized for expression in Escherichia coli"
MKLSMGKVMKTAMIAGGLATLPTVANAATAMLAATDYVGISFWTISMAMMAAAIFFLMEAGRLPGKWKTAMTIGALVQIVAAVHYFYMRDVWVSTGETPTVYRYVDWLITVPLQMVEFYFILAAVAVVSAGMFWRLMIGSLVMLVAGYLGEAGLVNAWLGFVVGMAGWAYILYEIFAGEAGKVSAESAPEAVQKSFSTMRMIVTVGWAIYPLGYFLGYLNGAADAVTLNVIYNVADVVNKIAFVGVIWAAANAEAAKA

SEQ ID NO: 258 - DNA, 777 bp, Artificial sequence
  source: /note="Description of Artificial Sequence: Engineered sequence; codons optimized for expression in Escherichia coli"
atgaaattgagcatgggtaaagttatgaaaacggcgatgattgctggtggtctggctacgctgccgacggtggcgaatgccgccaccgcgatgctggcagcgaccgattacgtcggcattagcttttggaccatcagcatggcgatgatggcggcagcgattttcttcctgatggaggcgggccgcttgccgggcaaatggaaaaccgccatgacgattggcgcgctggtgcagattgttgcagcggtgcactacttctatatgcgcgacgtttgggttagcaccggtgaaacgccgaccgtttaccgctatgtcgattggctgattaccgtcccgttgcaaatggtggagttttactttatcctggcggcggtcgcagttgtcagcgcgggcatgttctggcgcctgatgattggtagcctggttatgctggttgcgggttacttgggtgaagctggcttggttaacgcttggctgggtttcgtcgttggtatggctggttgggcgtacattctgtacgaaattttcgcgggcgaagcaggcaaagtctcggctgagagcgctccggaagcggttcaaaagtctttctccactatgcgtatgattgtgaccgttggctgggcgatctacccgctgggttacttcctgggttacctgaatggtgcagcagatgcagttaccctgaatgttatctataatgtggcggatgttgtgaacaaaattgcttttgtcggtgtcatttgggccgctgccaacgcggaagcagcgaaggcataa

SEQ ID NO: 259 - protein, 257 aa, Artificial sequence; identical to SEQ ID NO: 1
  source: /note="Description of Artificial Sequence: Engineered sequence; codons optimized for expression in Escherichia coli"

SEQ ID NO: 260 - DNA, 774 bp, Artificial sequence
  source: /note="Description of Artificial Sequence: Engineered sequence; codons optimized for expression in Escherichia coli"
atgagcattattaaaagcctgaagagcgtggcgatcgcgagcttggcgattctgattccaagcatcgcactggcagcgggcggtaacttggaaccgaacgatccggtcggcatcacgttctggctgattagcatcgctatggtggctgcgacggtgttcttcctgatggaaagcctgcgtgtggacggtaagtggcgtacctctatgattgtgggtggtttggtgacgctggtggcagccgtgcactacttttatatgcgtgacgtctgggtggctacgggtgcgtcccctaccgtctttcgttatgtggattggctgatcacggtgcctctgcaaatgattgaattttatctgatcctggccgcttgcaccgcgatcgctgttggcgttttctggcgtctgatgattggtactatggtgatgttgatcggtggctacctgggtgaggcgggtttcattaacgcgacggtgggctttgttatcggtatggcaggctggggttacattctgtacgaaatctttgcaggcgaagccggtaaagtcgcggctgagggtgctccgccgagcgtgcaaagcgcattcaacaccatgcgcctgatcgtcaccatcggctgggcgatctacccgctgggctacttcttcggctacatgaccggtggtgtcgacgccaattccctgaatttgatttacaacgttgcggatgtggtgaacaagatcggtttctgcctggccatctgggcagcagctaccagccaaagcgaggcggctaagtaa

SEQ ID NO: 261 - protein, 368 aa, Artificial sequence
  source: /note="Description of Artificial Sequence: Engineered sequence from Salinibacter ruber; codons optimized for expression in Escherichia coli"
MLRTTSASPRRRCGTSANATTSTKWWTGSPGSAASGSVCDPTRFGQSLDVRSPAPLWPNPARSMPQSPPATYRPPQVPTVDEVAARERASRLASRSIKTEAKVEGLKRLIAMLDLTTLEGADTPGKVKSLCQKARTPDPGSDQDHPSVGAVCVYPPMVPAAREQVADADINVASVASYFPSGQAALEERVAEVERVRDAGADEIDVVINRNAFLAGEYERVHREISALADASGEKHLKVILETGELETYDAVRLASRIAMDAGADFIKTSTGKVKPAATMPVTLVMLEAIRDYYRETGRPVGMKPAGGIRKAKPALRYLVMVREVLGDAWLTPERFRIGASSLLNDLLLQLEKERHGRYHSKRYLSLG

SEQ ID NO: 262 - DNA, 1107 bp, Artificial sequence
  source: /note="Description of Artificial Sequence: Engineered sequence from Salinibacter ruber; codons optimized for expression in Escherichia coli"
atgctgcgtactacgtctgcttctccgcgtcgtcgctgcggcaccagcgcgaacgcgactacgagcacgaagtggtggaccggcagccctggctccgcagcgagcggcagcgtgtgcgatccgacgcgttttggtcagtctttggacgtccgctctccagcgccgctgtggcctaatccggcgcgcagcatgccgcagagcccgccggcaacctaccgtccgccgcaagtcccgaccgttgatgaggtggcggcacgtgagcgcgcgagccgtctggcgagccgtagcattaaaacggaagcaaaagttgagggcctgaaacgtctgatcgccatgctggatttgacgaccctggagggcgcagacaccccgggcaaggttaaatcgttgtgtcaaaaggcacgtaccccagatccgggttccgatcaggaccatccaagcgttggtgcagtgtgcgtgtatccgccgatggttccggccgctcgtgaacaggtggcagatgcagacattaacgttgcatctgttgcgagctatttcccgtctggtcaagcagcgctggaggagcgtgtcgcggaagttgaacgcgtgcgtgacgcaggcgccgatgagatcgatgttgttattaatcgtaatgcctttctggcgggcgaatacgagcgcgttcaccgtgagattagcgcgctggcggatgcgtccggtgagaaacacctgaaggtcatcctggaaaccggcgaattggaaacctacgatgcagtccgtctggctagccgtatcgcgatggacgcgggcgccgacttcattaaaacctcgaccggtaaggtgaaaccggctgcgactatgccggtcacgctggtgatgctggaagcgatccgtgattattaccgcgaaaccggccgtccggttggtatgaagccggctggcggtattcgtaaggccaagccggcgctgcgttacctggtcatggtgcgtgaagtgctgggtgacgcgtggctgacccctgagcgttttcgtatcggtgcaagcagcctgctgaatgacctgctgttgcagctggaaaaggagcgccacggtcgctaccacagcaaacgttatctgagcctgggctga

SEQ ID NO: 263 - DNA, 1107 bp, Salinibacter ruber
atgttgcggacgacctcggcatctccaagaagacgctgtgggacaagcgcaaacgctacgacctcgacgaagtggtggaccggtagccccggttccgccgcgtcgggatcggtctgtgatcccactcgttttgggcagtccctcgatgtccgttcgccagcaccactttggcccaacccggcccgctccatgccacagtccccccccgccacgtaccgccccccgcaggtgcccaccgtcgacgaggtggccgcccgggagcgcgcctcccgcctcgccagtcgcagcatcaaaacagaggcgaaggtagagggcctaaagcgcctcatcgccatgctcgacctcacgacgctggagggggcggacacgccgggcaaggtgaaatccctctgccagaaggcccgcacgccggaccccggcagcgaccaggaccatccgtccgtcggggccgtctgcgtctacccgcccatggtgcccgcggcccgcgagcaggtggcggatgccgacatcaacgtggcgtcggtggcgagctacttcccgagcgggcaggcggcccttgaggagcgcgtggccgaggtggagcgggttcgggacgccggggccgacgaaatcgacgtcgtgatcaaccgcaacgcgttcctcgccggcgagtacgagcgggtgcaccgtgagatcagcgcgctggccgacgcgtccggcgagaagcacctgaaagtgattctggagacgggcgagctggaaacctacgacgccgtccgtttggccagccgcattgcgatggacgccggggccgacttcatcaagacctccaccggcaaggtgaagcccgccgcgacgatgccggtgacgctcgtgatgctggaggcgatccgcgactactaccgggagacgggccgcccggtgggcatgaagccggcggggggcatccggaaggcgaagccggccctccggtatctcgtcatggtcagagaggtgctcggcgacgcgtggctcacgcccgagcggttccggatcggggcctcgtcgctcctcaacgacctgctcctgcagctggagaaggagcggcacgggcgctaccactcgaagcgatacttgtcgctcgggtga

SEQ ID NO: 264 - protein, 360 aa, Artificial sequence
  source: /note="Description of Artificial Sequence: Engineered sequence from Synechococcus sp.; codons optimized for expression in Escherichia coli"
MTTTISAEKSIAAWLGEEAESLLGHSAKINQNLLTLPGADIVERVYAQSDRPTPVLRSLQQLFGTGRLANTGYLSILPVDQGIEHSGAASFAPNPIYFDPENIIRLAIEGGCNGVATTLGVLGMMSRKYAHRIPFIVKLNHNELLTYPNGTDQIMFATVEQAWNLGAIAVGATIYFGSPESSRQIQEVSRAFARAHELGMATILWCYLRNNVFKQDKDYHLAADLTGQANHMGVTIEADIIKQKLPETNNGYGAIAKATGQKYGRTHPKVYDELTSDHPIDLTRYQVLNCYGGRAGLINSGGSSGENDFAQAIRTAVINKRAGGCGLISGRKTFQRPMAEGVKLFHLIQDVYLDSEITIA

SEQ ID NO: 265 - DNA, 1083 bp, Artificial sequence
  source: /note="Description of Artificial Sequence: Engineered sequence from Synechococcus sp.; codons optimized for expression in Escherichia coli"
atgacgaccacgattagcgcggagaaaagcattgcggcgtggctgggcgaagaggcggaaagcctgctgggtcacagcgcgaagattaatcaaaacctgctgactctgccgggtgcggatatcgtcgagcgtgtgtatgcgcagagcgaccgcccaacgccggtgctgcgtagcctgcagcagctgtttggtacgggtcgcctggcaaatacgggttatctgagcatcctgccggtcgatcagggtatcgagcacagcggtgcggcgtctttcgcaccgaacccgatctactttgatccggagaatattatccgtttggcgatcgaaggcggctgcaatggtgtggccaccaccctgggtgttctgggtatgatgtctcgtaagtacgcacaccgcattccatttattgtcaagctgaatcataatgaactgctgacgtatccaaatggtaccgatcagatcatgtttgcgacggttgagcaagcgtggaatttgggtgcgattgctgtgggcgcgaccatttactttggcagcccggaatccagccgtcagattcaagaagtcagccgcgcattcgctcgtgcccatgagctgggcatggctacgattctgtggtgttatttgcgcaataacgttttcaagcaggacaaggactatcatctggccgcggacctgactggccaagcgaaccacatgggtgtcacgattgaagccgacattattaagcagaaactgccggagactaataacggttatggtgctattgccaaagcgaccggtcagaagtacggtcgtacgcatccgaaggtttacgatgagctgaccagcgatcacccgatcgatctgacgcgttaccaggtcctgaactgttacggtggccgtgcaggtctgatcaattctggtggctccagcggtgaaaatgattttgcgcaagctatccgtacggcagtcatcaacaaacgtgcaggtggctgtggtctgatttctggtcgcaaaaccttccaacgtccgatggcagagggcgttaagctgttccacctgatccaggatgtctacttggatagcgagatcaccattgcctga

SEQ ID NO: 266 - DNA, 1083 bp, Synechococcus sp.
atgacgacgaccatttctgccgaaaaatcaattgcagcttggcttggagaggaagcagaaagtctcttgggtcacagcgcgaaaattaatcaaaatctgctcaccctccccggagccgatatcgtagaacgggtctatgcccagagcgatcgccccactccagtcttacgttccttgcaacaattgtttggtacgggacggttagcgaatacaggctatctctcaattttgcccgtcgatcaaggcattgaacattccggggcggcttcctttgccccgaatccgatttattttgaccccgaaaacattatccgtctagccattgaaggggggtgtaacggcgtggcgacgaccctcggcgtgttgggaatgatgtcccgcaaatatgctcaccgcatcccgtttatcgtcaaactcaatcacaatgaactgctgacctatcccaacggtacggatcagattatgtttgcgacggtggaacaggcttggaatttgggggcgatcgccgtcggtgcaacaatttattttggctctccagaatcgagccgacaaattcaagaggttagccgtgcctttgcccgcgcccacgagctaggaatggcgacgattctctggtgttatctgcgcaacaatgtgtttaaacaggacaaggattaccatttggcggcggatttgacgggacaagcgaaccacatgggcgtaactatcgaggcggatattatcaaacaaaaattaccggaaaccaataatggctacggggcgatcgccaaagcgacgggccaaaaatacggcagaacccaccccaaagtttacgacgaactcaccagcgatcaccccatcgatctcacccgttatcaagtgttgaactgttatggcgggcgggctggtttaattaattccggtggctcctccggcgaaaacgattttgcccaagcaattcgcactgctgtgatcaataaacgcgcgggcggttgtggcctaatttctggtcgtaaaaccttccaacgacccatggcagaaggggttaaactctttcacctgatccaagatgtctatcttgattctgaaatcaccatcgcttaa

SEQ ID NO: 267 - DNA, 1038 bp, Artificial sequence
  source: /note="Description of Artificial Sequence: Engineered sequence from Synechococcus elongatus; codons optimized for expression in Escherichia coli"
atggagaaaaccatcggcctggaaatcattgaggtggtagagcaagccgctatcgcatctgcacgtctgatgggcaaaggtgagaagaacgaagcggatcgtgtggctgttgaagcgatgcgtgtgcgcatgaatcaggtcgaaatgctgggtcgcattgtaatcggcgaaggcgagcgtgacgaggcgccgatgctgtacatcggtgaggaagttggtatttaccgcgatgcagataaacgtgctggtgttccggcgggtaaactggtggaaatcgacatcgccgtggatccgtgcgaaggtaccaacctgtgcgcatacggtcagccgggttccatggcagtgctggcgatttccgagaaaggcggcctgtttgcggctccagacttctacatgaagaaactggccgctccgccggccgcgaaaggcaaagttgacatcaacaagtccgcgaccgagaacctgaaaatcctgtccgaatgtctggatcgcgccatcgacgaactggtagttgttgttatggaccgtccgcgtcacaaagaactgattcaggaaattcgtcaagctggtgcacgtgtccgtctgattagcgatggcgacgtctccgcggcaatctcctgcggtttcgctggcactaacacgcacgcgctgatgggtatcggtgcagcgcctgaaggtgtgatctctgccgcggccatgcgttgcctgggtggtcatttccagggtcagctgatttatgatccggaagtcgttaaaactggtctgatcggcgaatctcgtgaatctaacattgctcgtctgcaggaaatgggcatcactgaccctgaccgtgtttatgatgcgaacgaactggcaagcggtcaggaagtgctgtttgctgcatgtggcatcacgccaggcctgctgatggaaggcgtgcgtttctttaagggcggtgctcgcacccagtctctggttatcagctctcagagccgcactgctcgtttcgtagataccgtacacatgttcgatgatgttaaaaccgtaagcctgcgctaa

SEQ ID NO: 268 - DNA, 1038 bp, Synechococcus elongatus
atggagaagacgatcggtctcgagattattgaagttgtcgagcaggcagcgatcgcctcggcccgcctgatgggcaaaggcgaaaagaatgaagccgatcgcgtcgcagtagaagcgatgcgggtgcggatgaaccaagtggaaatgctgggccgcatcgtcatcggtgaaggcgagcgcgacgaagcaccgatgctctatatcggtgaagaagtgggcatctaccgcgatgcagacaagcgggctggcgtaccggctggcaagctggtggaaatcgacatcgccgttgacccctgcgaaggcaccaacctctgcgcctacggtcagcccggctcgatggcagttttggccatctccgagaaaggcggcctgtttgcagctcccgacttctacatgaagaaactggctgcacccccagctgccaaaggcaaagtagacatcaataagtccgcgaccgaaaacctgaaaattctctcggaatgtctcgatcgcgccatcgatgaattggtggtcgtggtcatggatcgtccccgccacaaagagctaatccaagagatccgccaagcgggtgcccgcgtccgtctgatcagcgatggtgacgtttcggccgcgatctcctgcggttttgctggcaccaacacccacgccctgatgggcatcggtgcagctcccgagggtgtgatttcggcagcagcaatgcgttgcctcggcggtcacttccaaggccagctgatctacgacccagaagtggtcaaaaccggcctgatcggtgaaagccgtgagagcaacatcgctcgcctgcaagaaatgggcatcaccgatcccgatcgcgtctacgacgccaacgaactggcttcgggtcaagaagtgctgtttgcggcttgcggtatcaccccgggcttgctgatggaaggcgtgcgcttcttcaaaggcggcgctcgcacccagagcttggtgatctccagccagtcacggacggctcgcttcgttgacaccgttcacatgttcgacgatgtcaaaacggttagcctccgttaa

SEQ ID NO: 269 - DNA, 1044 bp, Artificial sequence
  source: /note="Description of Artificial Sequence: Engineered sequence from Thermosynechococcus elongatus; codons optimized for expression in Escherichia coli"
atggacaacgtcatcggcctggaaattattgaagttgtagagcaggccgcgatcgcttctgctcgttggatgggtaaaggtgacaaaaatatggcagatcaggcggctgtggacgcgatgcgtaatcgcatgaaccagatccatatgcgtggtcgtatcgtgatcggcgagggtgaacgcgacgaagctccgatgctgtatatcggtgaggaagtgggcatctgcacgcgcccggatgcggcacaatactgtaacccggaagaactgatcgaaattgacatcgccgtggatccgtgcgaaggcactaacctgtgcgcatatggccagcctggcagcatggccgtgctggcaatctccgaaaagggtggtctgttcgcggcaccggatttctacatgaaaaaactggctgcgccgccagccgcaaaaggtaaggttgacattcgcaatagcgcaaccgaaaacctgaaaattctgtccgaatgcctggaccgtgcgatcgatgaactggtagtcgttgttatgaaacgtgatcgtcataacgatctgattcaagagatccgtgatgccggtgctcgtgttcagctgatttccgacggcgacgtaagcgcagcgctggcttgtgctttctctggcacgaacatccacgcactgatgggcatcggtgcagctccggagggtgtaatttccgcggccgcaatgcgtgcgctgggcggtcacttccagggccaactggtttacgaccctgccgtggttatgactaaggaatgggcgaaccgtacccgcgaaggtaacctggaagagctgaaaaaagcgggtatcactgatccggacaaagtatacgaagcggaggaactggcttctggtgaaaccgttctgtttgctgcttgtggcattactccgggtatgctgatgaaaggcgtccgtttttttaaaggtggtgcacgcacccagtctctggttatctctacccagtctaagaccgctcgtttcgttgataccatccacatgttcgaccagcagctgaaatctctgcagctgtactaa

SEQ ID NO: 270 - DNA, 1044 bp, Thermosynechococcus elongatus
atggataacgtcatcggcttagagatcattgaagttgtcgagcaggcggcgatcgcctcagcgcggtggatgggcaaaggtgacaaaaacatggcggatcaggcggccgtcgatgccatgcgcaaccgcatgaatcaaatccatatgcgtggtcgcattgtcattggtgagggggaacgggatgaagccccaatgctctacattggtgaagaagtgggcatttgtacccgtcccgatgctgcccaatactgtaaccctgaagagctcattgaaattgacattgccgttgacccctgcgaagggacaaacctttgcgcctacggtcaaccaggctcgatggcagtgctggccatttccgaaaaaggggggttatttgcagctcccgacttttatatgaagaaattggcagcaccccctgctgctaagggcaaagtggatattcgcaactccgcaacagaaaacctgaaaattctctctgaatgccttgaccgtgccattgatgaattggtggtggtggtcatgaagcgcgatcgccacaatgacttaattcaagaaatccgcgatgcgggtgcccgcgttcaactgatctccgatggcgacgtctccgcagctctggcctgtgctttctccggtaccaacattcatgccctcatgggaattggcgctgcgcccgaaggggtgatttctgctgctgccatgcgcgccttaggtggccacttccaagggcaactggtctatgatcccgctgtggtcatgaccaaggaatgggccaatcgcacccgcgaaggcaaccttgaagagctgaaaaaagcgggcatcaccgatcccgataaagtgtatgaagcggaagaattggcctctggggaaacggtgctctttgctgcctgtggcattacccccggcatgctcatgaaaggggtgcgtttcttcaagggaggtgcccgtacccaatctctggttatttccacgcagtcgaagacagcacgctttgtggatacaatccacatgttcgatcagcagttgaagtcactccagctgtactaa

SEQ ID NO: 271 - DNA, 1011 bp, Artificial sequence
  source: /note="Description of Artificial Sequence: Engineered sequence from Synechococcus sp.; codons optimized for expression in Escherichia coli"
atggtggatccgtctaaaccggatcgtgtagttctgattggtgttgcaggtgattctggttgcggtaaatccactttcctgaaccgtctggcggacctgttcggtactgagctgatgaccgtgatctgcctggatgactatcacagcctggaccgtaaaggccgtaaagaggctggcgttaccgctctggaccctcgtgccaacaacttcgacctgatgtatgaacaagttaaagcgctgaaaaacggtgaaactattatgaaaccaatctataaccacgaaactggtctgatcgaccctccggaaaagatcgaaccaaaccgtatcatcgtgattgaaggtctgcatccactgtacgatgaacgtgtgcgcgaactgctggacttttctgtttacctggatattgatgatgaagttaaaatcgcatggaaaattcagcgcgatatggcggaacgtggtcactcctacgaagatgtgctggcgagcattgaagcgcgtcgcccggacttcaaggcatacattgaaccgcagcgtggtcacgccgacattgtgatccgcgtaatgccgacccaactgatccctaacgataccgaacgtaaagttctgcgtgttcagctgatccagcgtgaaggccgtgacggttttgaaccggcatacctgtttgacgaaggctctactatccaatggactccgtgcggccgtaaactgacctgctcttacccgggcatccgtctggcatacggcccggatacctactatggccatgaagtatctgtactggaagtcgatggtcagttcgaaaacctggaagaaatgatctatgttgaaggccatctgtctaaaaccgatactcagtactatggtgaactgacccacctgctgctgcaacacaaggattacccaggcagcaacaacggcaccggtctgtttcaggtactgaccggcctgaaaatgcgtgcggcttacgaacgcctgacctctcaggccgcaccggttgccgcgagcgtttga

SEQ ID NO: 272 - DNA, 2131 bp, Synechococcus elongatus
atgcccaagacgcaatctgccgcaggctataaggccggggtgaaggactacaaactcacctattacacccccgattacacccccaaagacactgacctgctggcggctttccgcttcagccctcagccgggtgtccctgctgacgaagctggtgcggcgatcgcggctgaatcttcgaccggtacctggaccaccgtgtggaccgacttgctgaccgacatggatcggtacaaaggcaagtgctaccacatcgagccggtgcaaggcgaagagaactcctactttgcgttcatcgcttacccgctcgacctgtttgaagaagggtcggtcaccaacatcctgacctcgatcgtcggtaacgtgtttggcttcaaagctatccgttcgctgcgtctggaagacatccgcttccccgtcgccttggtcaaaaccttccaaggtcctccccacggtatccaagtcgagcgcgacctgctgaacaagtacggccgtccgatgctgggttgcacgatcaaaccaaaactcggtctgtcggcgaaaaactacggtcgtgccgtctacgaatgtctgcgcggcggtctggacttcaccaaagacgacgaaaacatcaactcgcagccgttccaacgctggcgcgatcgcttcctgtttgtggctgatgcaatccacaaatcgcaagcagaaaccggtgaaatcaaaggtcactacctgaacgtgaccgcgccgacctgcgaagaaatgatgaaacgggctgagttcgctaaagaactcggcatgccgatcatcatgcatgacttcttgacggctggtttcaccgccaacaccaccttggcaaaatggtgccgcgacaacggcgtcctgctgcacatccaccgtgcaatgcacgcggtgatcgaccgtcagcgtaaccacgggattcacttccgtgtcttggccaagtgtttgcgtctgtccggtggtgaccacctccactccggcaccgtcgtcggcaaactggaaggcgacaaagcttcgaccttgggctttgttgacttgatgcgcgaagaccacatcgaagctgaccgcagccgtggggtcttcttcacccaagattgggcgtcgatgccgggcgtgctgccggttgcttccggtggtatccacgtgtggcacatgcccgcactggtggaaatcttcggtgatgactccgttctccagttcggtggcggcaccttgggtcacccctggggtaatgctcctggtgcaaccgcgaaccgtgttgccttggaagcttgcgtccaagctcggaacgaaggtcgcgacctctaccgtgaaggcggcgacatccttcgtgaagctggcaagtggtcgcctgaactggctgctgccctcgacctctggaaagagatcaagttcgaattcgaaacgatggacaagctctaaggagcctctgactatcgctgggggagtgagcgttgctgcgtaaagctttctccccagcctttcgacttaacctttcaggatttctgaatcatgagcatgaaaactctgcccaaagagcgtcgtttcgagactttctcgtacctgcctcccctcagcgatcgccaaatcgctgcacaaatcgagtacatgatcgagcaaggcttccaccccttgatcgagttcaacgagcactcgaatccggaagagttctactggacgatgtggaagctccccctgtttgactgcaagagccctcagcaagtcctcgatgaagtgcgtgagtgccgcagcgaatacggtgattgctacatccgtgtcgctggcttcgacaacatcaagcagtgccaaaccgtgagcttcatcgttcatcgtcccggccgctactaaagcctgatttgtcttgatagctgctctgcctttgggcaggggcttttttctgtctgccattcttgaggatggcggactctttcccttttgctctacgcccatgaatgcgatcgcagtctcccctgtccagcacgttggagtgattggtggtggccagttagcttggagtctggcaccagcagcgcaacagttggggatgtcgctgcacgttcaaacacccaatgatcacgacccagcagtagcgatcgcggatcaaaccgtattgcaagcagttgctgacgctgca

SEQ ID NO: 273 - protein, 472 aa, Synechococcus elongatus
MPKTQSAAGYKAGVKDYKLTYYTPDYTPKDTDLLAAFRFSPQPGVPADEAGAAIAAESSTGTWTTVWTDLLTDMDRYKGKCYHIEPVQGEENSYFAFIAYPLDLFEEGSVTNILTSIVGNVFGFKAIRSLRLEDIRFPVALVKTFQGPPHGIQVERDLLNKYGRPMLGCTIKPKLGLSAKNYGRAVYECLRGGLDFTKDDENINSQPFQRWRDRFLFVADAIHKSQAETGEIKGHYLNVTAPTCEEMMKRAEFAKELGMPIIMHDFLTAGFTANTTLAKWCRDNGVLLHIHRAMHAVIDRQRNHGIHFRVLAKCLRLSGGDHLHSGTVVGKLEGDKASTLGFVDLMREDHIEADRSRGVFFTQDWASMPGVLPVASGGIHVWHMPALVEIFGDDSVLQFGGGTLGHPWGNAPGATANRVALEACVQARNEGRDLYREGGDILREAGKWSPELAAALDLWKEIKFEFETMDKL

SEQ ID NO: 274 - DNA, 1419 bp, Artificial sequence
  source: /note="Description of Artificial Sequence: Engineered sequence from Synechococcus elongatus; codons optimized for expression in Escherichia coli"
atgccgaaaacccagtctgcagcaggctataaagcaggcgttaaggactataaactgacctattacactccggactacactccgaaagataccgatctgctggcggctttccgtttctctccgcaaccgggtgttccggcagatgaggcgggtgctgctattgcagcggaatcctccaccggtacttggactaccgtttggactgatctgctgaccgacatggatcgttataaaggcaagtgttatcacattgagccggttcagggtgaagagaactcttacttcgcgtttatcgcttacccactggatctgttcgaagaaggctctgttacgaacatcctgactagcatcgtaggtaacgtattcggcttcaaggctatccgttctctgcgtctggaggacattcgcttcccggtggctctggtaaagaccttccaaggtccgccgcatggcatccaggttgagcgtgacctgctgaacaaatacggtcgtccgatgctgggttgtactattaaaccgaaactgggtctgagcgctaagaactacggtcgtgcggtatatgaatgtctgcgcggtggcctggacttcaccaaggacgatgaaaacatcaactctcagccattccagcgttggcgcgatcgtttcctgttcgtggcggatgcgatccacaagtcccaagccgaaaccggtgagatcaaaggccactacctgaacgttaccgcccctacctgtgaagaaatgatgaaacgtgccgaatttgcaaaggaactgggcacgccgattattatgcacgatttcctgactgcaggttttaccgcgaacaccactctggcgaaatggtgtcgtgacaacggtgtgctgctgcatatccaccgcgctatgcacgcggtaatcgatcgccagcgtaatcatggtatccacttccgcgttctggcaaaatgcctgcgtctgtctggcggcgaccatctgcactccggtactgttgtaggcaaactggaaggtgataaagcgtctaccctgggctttgtggacctgatgcgcgaggatcatattgaggcggatcgttctcgtggtgtattcttcacccaagattgggccagcatgccgggcgtgctgccggtagcgtccggtggcatccacgtttggcacatgccagcactggtagaaatcttcggcgatgattctgtcctgcagttcggtggtggtacgctgggtcacccgtggggtaacgcgccgggcgctacggcgaaccgtgtagcgctggaggcgtgcgttcaggcgcgtaacgaaggccgtgacctgtaccgtgaaggtggcgacatcctgcgtgaagcgggcaaatggtccccggaactggctgctgcactggacctgtggaaagagatcaaattcgagttcgaaactatggataaactgtaa

SEQ ID NO: 275 - DNA, 336 bp, Synechococcus elongatus
atgagcatgaaaactctgcccaaagagcgtcgtttcgagactttctcgtacctgcctcccctcagcgatcgccaaatcgctgcacaaatcgagtacatgatcgagcaaggcttccaccccttgatcgagttcaacgagcactcgaatccggaagagttctactggacgatgtggaagctccccctgtttgactgcaagagccctcagcaagtcctcgatgaagtgcgtgagtgccgcagcgaatacggtgattgctacatccgtgtcgctggcttcgacaacatcaagcagtgccaaaccgtgagcttcatcgttcatcgtcccggccgctactaa

SEQ ID NO: 276 - protein, 111 aa, Synechococcus elongatus
MSMKTLPKERRFETFSYLPPLSDRQIAAQIEYMIEQGFHPLIEFNEHSNPEEFYWTMWKLPLFDCKSPQQVLDEVRECRSEYGDCYIRVAGFDNIKQCQTVSFIVHRPGRY

SEQ ID NO: 277 - DNA, 336 bp, Artificial sequence
  source: /note="Description of Artificial Sequence: Engineered sequence from Synechococcus elongatus; codons optimized for expression in Escherichia coli"
atgtccatgaaaactctgccgaaagaacgtcgtttcgagactttcagctacctgccgccgctgtctgaccgtcagatcgcggcgcagatcgaatatatgattgaacagggcttccatccgctgatcgagtttaacgagcacagcaacccggaagaattttactggactatgtggaagctgcctctgttcgattgtaaatctcctcagcaagtgctggacgaagtgcgtgaatgtcgctctgaatacggtgattgctacatccgtgttgcaggcttcgataatatcaagcagtgtcagacggtttccttcattgtccatcgcccgggtcgttactaa
